(19) United States
(12) Patent Application Publication
(10) Pub. No.: US 2023/0313154 A1
(43) Pub. Date: Oct. 5, 2023

(54) PRENYLTRANSFERASE ENZYMES

(71) Applicant: CB THERAPEUTICS, INC., Carlsbad, CA (US)

(72) Inventors: Erin Marie Scott, Encinitas, CA (US); Jacob Michael Vogan, San Diego, CA (US); Tyrone Jacob Yacoub, Murrieta, CA (US)

(73) Assignee: CB THERAPEUTICS, INC., Carlsbad, CA (US)

(21) Appl. No.: 18/016,673

(22) PCT Filed: Jul. 16, 2021
(86) PCT No.: PCT/US2021/042090

§ 371 Date: Jan. 17, 2023

Related U.S. Application Data
(60) Provisional application No. 63/053,539, filed on Jul. 17, 2020.

(51) Int. Cl. C12N 9/10; C12N 15/81

(52) U.S. Cl. CPC C12N 9/1085; C12N 15/81

(57) ABSTRACT

Provided is a nucleic acid comprising a sequence encoding a prenyltransferase (PT) gene or its complement, codon optimized for production in a microorganism or a plant. Also provided is a yeast expression cassette comprising the above nucleic acid. Additionally provided is a non-naturally occurring prenyltransferase (PT) comprising an amino acid sequence having at least 90% amino acid sequence identity or conservative amino acid substitutions to the amino acid sequences encoded by the above nucleic acid. Further provided is a recombinant microorganism or plant expressing a PT encoded by the above nucleic acid. Additionally provided is a method of catalyzing the condensation of a polyprenol diphosphate and an alkylresorcinol or alkylresorcyclic acid to yield a cannabinoid.

### CROSS-REFERENCE TO RELATED APPLICATIONS

[0001] This application claims the benefit of U.S. Provisional Application No. 63/053,539, filed Jul. 17, 2020, and incorporated by reference herein in its entirety.

### INCORPORATION-BY-REFERENCE OF MATERIAL SUBMITTED ON A COMPACT DISC

[0002] The Sequence Listing, which is a part of the present disclosure, includes a computer readable form and a written sequence listing comprising nucleotide and/or amino acid sequences of the present invention. The sequence listing information recorded in computer readable form is identical to the written sequence listing. The subject matter of the Sequence Listing is incorporated herein by reference in its entirety.

### BACKGROUND OF THE INVENTION

### Field of the Invention

[0003] The present application generally relates to recombinant enzymes and genes encoding those enzymes. More specifically, the application provides recombinant prenyltransferase genes and enzymes that function in microorganisms and plants.

### Description of the Related Art

[0004] Cannabinoids are a class of organic small molecules of meroterpenoid structures found in the plant genus Cannabis. The small molecules are currently under investigation as therapeutic agents for a wide variety of health issues, including epilepsy, pain, and other neurological problems, and mental health conditions such as depression, PTSD, opioid addiction, and alcoholism (Committee on the Health Effects of Marijuana, 2017).

[0005] While it is known that cannabinoids may be obtained via biosynthesis in plant species, there are many problems associated with the synthesis of such molecules which need to be overcome, including problems with large-scale manufacturing, purification, and heterologous expression for biosynthesis.

[0006] Producing cannabinoids, in recombinant microorganisms such as yeast is a promising solution to the above problems. See, e.g., U.S. Pat. Applications 16/553103, 16/553120, 17/068636 and 63/053539; U.S. Pats. 10,435,727 and 11,041,002; and U.S. Pat. Publications 2020/0063170 and 2020/0063171, all incorporated by reference.

[0007] One way to improve biosynthetic cannabinoid production in microorganisms is by the discovery and use of new enzymes that catalyze the same reactions as plant derived enzymes but with improved parameters. The present invention provides such enzymes with prenyltransferase activity.

### BRIEF SUMMARY OF THE INVENTION

[0008] Provided is a nucleic acid comprising a sequence encoding a prenyltransferase (PT) gene or its complement, codon optimized for production in a microorganism or a plant.

[0009] Also provided is a yeast expression cassette comprising the above nucleic acid.

[0010] Additionally provided is a non-naturally occurring prenyltransferase (PT) comprising an amino acid sequence having at least 90% amino acid sequence identity or conservative amino acid substitutions to the amino acid sequences encoded by the above nucleic acid.

[0011] Further provided is a recombinant microorganism or plant expressing a PT encoded by the above nucleic acid.

[0012] The present invention is also directed to a method of catalyzing the condensation of a polyprenol diphosphate and an alkylresorcinol or alkylresorcyclic acid to yield a cannabinoid. The method comprises combining the polyprenol diphosphate and the alkylresorcinol or alkylresorcyclic acid with the above PT.

### BRIEF DESCRIPTION OF THE SEVERAL VIEWS OF THE DRAWINGS

[0013] Those of skill in the art will understand that the drawings, described below, are for illustrative purposes only. The drawings are not intended to limit the scope of the present teachings in any way.

[0014] FIG. 1 depicts a table of amino acids and codon triplets.

[0015] FIG. 2A depicts the biosynthesis pathway that yields cannabinoids and intermediates used in cannabinoid biosynthesis.

[0016] FIG. 2B depicts the mechanism for yielding cannabinoids in the heterologous recombinant host.

[0017] FIG. 3 depicts a heat cluster map of the fungal prenyltransferase enzymes and their similarity to each other.

[0018] FIG. 4 depicts a heterologous recombinant host organism expressing the fungal prenyltransferase cannabinoid pathway with and without a mixture of plant or fungal prenyltransferases.

[0019] FIG. 5 depicts the chromatogram and UV-VIS spectrum of CBGA produced by a fungal derived prenyltransferase in a recombinant host.

[0020] FIG. 6 depicts the overlay chromatogram and UV-VIS spectrum of CBGA produced by a recombinant host expressing a mixture of prenyltransferase enzymes.

[0021] FIG. 7 depicts the chromatogram and UV-VIS spectrum of THCA produced by a recombinant host expressing a fungal prenyltransferase with downstream cannabinoid synthases.

[0022] FIG. 8 depicts the chromatogram and UV-VIS spectrum of CBGVA and THCVA produced by a recombinant host expressing a fungal prenyltransferase with downstream cannabinoid synthases.

### DETAILED DESCRIPTION OF THE INVENTION

### Abbreviations and Definitions

[0023] To facilitate understanding of the invention, a number of terms and abbreviations as used herein are defined below as follows:

[0024] Conservative amino acid substitutions: As used herein, when referring to mutations in a protein, “conservative amino acid substitutions” are those in which at least one amino acid of the polypeptide encoded by the nucleic acid sequence is substituted with another amino acid having similar characteristics. Examples of conservative amino acid substitutions are ser for ala, thr, or cys; lys for arg; gln for asn, his, or lys; his for asn; glu for asp or lys; asn for his or gln; asp for glu; pro for gly; leu for ile, phe, met, or val; val for ile or leu; ile for leu, met, or val; arg for lys; met for phe; tyr for phe or trp; thr for ser; trp for tyr; and phe for tyr.

[0025] Functional variant: The term “functional variant,” as used herein, refers to a recombinant enzyme such as a fungal prenyltransferase that comprises a nucleotide and/or amino acid sequence that is altered by one or more nucleotides and/or amino acids compared to the nucleotide and/or amino acid sequences of the parent protein and that is still capable of performing an enzymatic function (e.g., synthesis of a cannabinoid) of the parent enzyme. In other words, the modifications in the amino acid and/or nucleotide sequence of the parent enzyme may cause desirable changes in reaction parameters without altering fundamental enzymatic function encoded by the nucleotide sequence or containing the amino acid sequence. The functional variant may have conservative change including nucleotide and amino acid substitutions, additions and deletions. These modifications can be introduced by standard techniques known in the art, such as site-directed mutagenesis and random PCR-mediated mutagenesis, and may comprise natural as well as non-natural nucleotides and amino acids. Also envisioned is the use of amino acid analogs, e.g. amino acids not DNA or RNA encoded in biological systems, and labels such as fluorescent dyes, radioactive elements, electron dense agents, or any other protein modification, now known or later discovered.

[0026] Recombinant nucleic acid and recombinant protein: As used herein, a recombinant nucleic acid or protein is a nucleic acid or protein produced by recombinant DNA technology, e.g., as described in Green and Sambrook (2012).

[0027] Polypeptide, protein, and peptide: The terms “polypeptide,” “protein,” and “peptide” are used herein interchangeably to refer to amino acid chains in which the amino acid residues are linked by peptide bonds or modified peptide bonds. The amino acid chains can be of any length of greater than two amino acids. Unless otherwise specified, the terms “polypeptide,” “protein,” and “peptide” also encompass various modified forms thereof. Such modified forms may be naturally occurring modified forms or chemically modified forms. Examples of modified forms include, but are not limited to, glycosylated forms, phosphorylated forms, myristoylated forms, palmitoylated forms, ribosylated forms, acetylated forms, and the like. Modifications also include intra-molecular crosslinking and covalent attachment of various moieties such as lipids, flavin, biotin, polyethylene glycol or derivatives thereof, and the like. In addition, modifications may also include protein cyclization, branching of the amino acid chain, and cross-linking of the protein. Further, amino acids other than the conventional twenty amino acids encoded by genes may also be included in a polypeptide.

[0028] The term “protein” or “polypeptide” may also encompass a “purified” polypeptide that is substantially separated from other polypeptides in a cell or organism in which the polypeptide naturally occurs (e.g., 30%, 40%, 50%, 60%, 70%, 80%, 90%, 95%, 96%, 97%, 98%, 99%, 100% free of contaminants).

[0029] Primer, probe and oligonucleotide: The terms “primer,” “probe,” and “oligonucleotide” may be used herein interchangeably to refer to a relatively short nucleic acid fragment or sequence. They can be DNA, RNA, or a hybrid thereof, or chemically modified analogs or derivatives thereof. Typically, they are single-stranded. However, they can also be double-stranded having two complementing strands that can be separated apart by denaturation. In certain aspects, they are of a length of from about 8 nucleotides to about 200 nucleotides. In other aspects, they are from about 12 nucleotides to about 100 nucleotides. In additional aspects, they are about 18 to about 50 nucleotides. They can be labeled with detectable markers or modified in any conventional manners for various molecular biological applications.

[0030] Vector: As used herein, the term “vector” refers to a nucleic acid molecule capable of transporting another nucleic acid to which it has been linked. One type of vector is an episome, i.e., a nucleic acid capable of extra-chromosomal replication. Various vectors are those capable of autonomous replication and/expression of nucleic acids to which they are linked. Vectors capable of directing the expression of genes to which they are operatively linked are referred to herein as “expression vectors.”

[0031] Linker: The term “linker” refers to a short amino acid sequence that separates multiple domains of a polypeptide. In some embodiments, the linker prohibits energetically or structurally unfavorable interactions between the discrete domains.

[0032] Cannabinoid: As used herein, the term “cannabinoid” refers to a family of structurally related aromatic meroterpenoid molecules. Cannabinoids are generally formed by the enzymatic fusion, by a cannabinoid synthase (having geranylpyrophosphate:olivetolate geranyltransferase activity), of an alkylresorcylic acid

[chemical structure]

where R¹ = CH₃, (CH₂)₂CH₃ (divarinolic acid), (CH₂)₄CH₃ (olivetolic acid), or (CH₂)₆CH₃, with a polyprenyl pyrophosphate such as geranyl pyrophosphate, neryl pyrophosphate, geranylgeranyl pyrophosphate, of farnesyl pyrophosphate (FIG. 1; see also Luo et al., 2019; Carvalho et al., 2017; and Gülck and Møller, 2020 and references cited therein). The polyprenyl pyrophosphate is synthesized by geranyl pyrophosphate synthase (GPPS) (US Provisional Patent Application 63/141486).

[0033] Codon optimized: As used herein, a recombinant gene is “codon optimized” when its nucleotide sequence is modified to accommodate codon bias of the host organism to improve gene expression and increase translational efficiency of the gene.

[0034] Expression cassette: As used herein, an “expression cassette” is a nucleic acid that comprises a gene and a regulatory sequence operatively coupled to the gene such that the promoter drives the expression of the gene in a cell. An example is a gene for an enzyme with a promoter functional in yeast, where the promoter is situated such that the promoter drives the expression of the enzyme in a yeast cell.

### Prenyltransferase Enzymes for Biosynthesis of Cannabinoids

[0035] The present teachings relate to prenyltransferase (PT) enzymes, for example fungal PT enzymes, for biosynthesis of cannabinoids, nucleic acids encoding the PTs, host organisms for generating cannabinoids, and methods of generating cannabinoids in those host organisms.

[0036] PTs transfer a prenyl group, a product of the mevalonate pathway, onto a prenyl acceptor, usually a phenolic molecule, in this case, an alkylresorcylic acid, such as olivetolic acid. PTs are found in fungi, bacteria, plants, archaea, and animals and are often but not exclusively involved in secondary metabolism. PTs are also involved in basic cellular metabolism such as the biosynthesis of the cofactor Coenzyme Q.

[0037] As depicted in FIG. 2A, PTs catalyze the addition of a prenyl group from a prenyl donor (e.g., GPP) containing a pyrophosphate moiety to a prenyl acceptor (e.g., OA). An ionization-condensation-elimination mechanism has been proposed as the reaction mechanism for prenyl addition. PTs may be soluble enzymes, free floating in the cytosol, or membrane integral proteins. Membrane integral proteins are distinguished by their structure, having alpha helices that pass through cellular membranes, such that the protein is embedded in either an organellar membrane or the plasma membrane of the cell.

[0038] The PTs and nucleic acids encoding the PTs are useful for producing cannabinoids genetically modified microorganisms or plants, since the PTs catalyze the condensation of olivetol (OL) or olivetolic acid (OA) and its derivatives with geranyl pyrophosphate (GPP) or other related isoprenes to yield cannabigerolic acid (CBGA), cannabigerol (CBG), cannabigerovarinic acid (CBGVA), or other cannabinoid derivatives. This engineered prenyltransferase pathway can be used in conjunction with other recombinant enzymes to make a variety of cannabinoids such as cannabidiol (CBD), tetrahydrocannabivarin (THCV), cannabichromene (CBC), and other common or novel cannabinoids.

[0039] Referring to FIG. 2A, the biosynthesis pathway, including precursors, that yields cannabinoids, is depicted. Specific cannabinoids and terpenes can be produced by varying the concentration of a precursor molecule. For example, cannabinoids produced by the metabolic pathway commencing with olivetolic acid (OA), divarinic acid (DA) (also called divarinolic acid or varinolic acid), orsellinic acid; or sphaerophorolic acid; and terpenes can be produced by the metabolic pathway commencing with geranyl pyrophosphate (GPP), farnesyl pyrophosphate (FPP), and/or geranylgeranyl pyrophosphate (GGPP).

[0040] A specific PT is the CBGA synthase/geranyl-olivetol transferase (GOT) enzyme.

[0041] FIG. 2B provides details of the PT reaction. Reverse prenylation is when the prenyl group is attached to the prenyl acceptor via a carbon-carbon bond between the prenyl acceptor and the non-pyrophosphate linked end of the prenyl donor. When pyrophosphate leaves GPP, a cation results, where the dominant species is a conical structure with the most stabilized cation (e.g., benzylic cations over secondary cations). However, other stabilized cations may be present, such as tertiary or allylic cations. This leads to a mixture of products, as there a plurality of stabilized cations, which are often reactive. The prenyl cation upon the loss of pyrophosphate may be a primary allylic cation or a tertiary allylic cation (via the migration of the terminal double bond for resonance stabilization). Tertiary allylic cations are able to stabilize the positive charge with both inductive and resonance stabilizations. Primary allylic cations are able to stabilize the positive charge with resonance stabilization. Therefore, the tertiary allylic cation is more stabilized than the primary allylic cation. As such, the tertiary allylic cation is expected to persist in higher concentrations than the primary cation. However, there is no evidence of the tertiary allylic cation persisting or even forming as the reaction pathway on the right side of FIG. 2B does not occur in the formation of classic cannabinoids (e.g. CBGA) and meroterpenoids. In contrast, the primary allylic cation on the left side of FIG. 2B exclusively persists for electrophilic aromatic substitution and subsequent deprotonative aromatization to selectively form meroterpenoids, as catalyzed by fungal PT in the recombinant host.

[0042] Non-Cannabis derived PTs can: (i) catalyze reverse prenylations, or (ii) have O-specificity or N-specificity. Some PTs are specific for prenylating proteins, attaching the prenyl group to a cysteine residue in the C-terminus of the target protein. O-specificity is where the prenyl group is attached to an oxygen in the prenyl acceptor instead of a carbon. N-specificity is when the prenyl group is attached to a nitrogen in the prenyl acceptor instead of a carbon. The nitrogen of the indole ring on a tryptophan residue is another possible target for protein prenylation. Some PTs are specific in their requirements for the prenyl donor.

[0043] Cannabis-derived PTs may use: (i) GPP (10 carbon prenyl donor); (ii) DMAPP (5 carbon prenyl donor); (iii) FPP (15 carbon prenyl donor); or (iv) GGPP (20 carbon prenyl donor). Only a limited subset of Cannabis-derived PTs are able to produce cannabinoids.

[0044] It should be noted that not all PTs can synthesize cannabinoids. Many PTs have loose substrate specificity and can accept a wide variety of substrates, but cannabinoid biosynthesis activity is rare in nature. Cannabis spp. are the primary organisms known to produce cannabinoids in nature.

[0045] Precursors of cannabinoids include alkylrescorcinol and alkylrescorcyclic acid compounds such as olivetol (OL) and olivetolic acid (OA) that are produced from common cellular metabolites hexanoyl-CoA and malonyl CoA.

[0046] In plants, olivetol is produced from hexanoyl-CoA and malonyl-CoA by the action of the polyketide synthase olivetol synthase; and olivetolic acid is produced from olivetol by the action of the enzyme olivetolic acid cyclase. See, e.g., US Provisional Patent Application 63/194,121.

[0047] Another precursor compound is a polyprenol compound, geranyl pyrophosphate (GPP) (also referred to as geranyl diphosphate), which is a product of the mevalonate pathway (see FIG. 2A). See, e.g., U.S. Provisional Pat. Application 63/141,486.

[0048] In plants, cannabigerolic acid (CBGA) is produced from OA and GPP by the action of the enzyme cannabigerolic acid synthase (CBGAS), also called geranyl-olivetol transferase (GOT).

[0049] Downstream cannabinoids are produced by the action of downstream cannabinoid synthases on cannabigerolic acid. For example, THCA synthase converts CBGA to THCA. Cannabidiolic acid synthase converts CBGA to CBDA. Cannabichromenic acid synthase converts CBGA to CBCA (see FIG. 2A). Other cannabinoids are made by further modification(s) of CBGA, CBGVA, CBGOA, CBGPA, CBDA, THCA, and/or CBCA.

[0050] Referring to FIG. 3, a two-dimensional clustermap demonstrates the diversity of fungal PT enzymes with GOT activity, which displays the percentage of identical residues between each pair of Fungal PT enzymes, where a darker shaded block correlates with higher similarity.

[0051] The activity of the putative PTs can be determined by any method known in the art. In some embodiments, each candidate polypeptide is introduced into a host cell genetically modified to contain the components for CBGA biosynthesis using standard yeast cell transformation techniques (see, e.g., Green and Sambrook, 2012). Cells are subjected to fermentation, under conditions that activate the promoter controlling the candidate polypeptide (see Example 2). The fermentation broth is then subjected to HPLC analysis (see Example 5). As an example of GOT function determination of the resulting polypeptide, if CBGA is detected by HPLC analysis relative to an analytical standard, then the candidate polypeptide is determined to be a functional CBGA synthase in this context.

### Nucleic Acids

[0052] In some embodiments, a nucleic acid comprising a sequence encoding a prenyltransferase (PT) gene or its complement is provided. In these embodiments, the PT gene is codon optimized for production in a microorganism or a plant.

[0053] As provided in US Pat. No. 10,435,727, nucleotide sequences are codon optimized for expression of heterologous polypeptides in a host by utilizing a number of considerations:
[0054] (1) For each amino acid of the recombinant polypeptide to be expressed, a codon (triplet of nucleotide bases) is selected based on the frequency of each codon in a heterologous host microorganism or plant genome, for example the Saccharomyces cerevisiae genome; the codon can be chosen to be the most frequent codon or can be selected probabilistically based on the frequencies of all possible codons.
[0055] (2) In order to prevent DNA cleavage due to a restriction enzyme, certain restriction sites are removed by changing codons that cover those sites.
[0056] (3) To prevent low-complexity regions, long repeats (sequences of any single base longer than five bases) are modified. (2) and (3) are performed recursively to ensure that codon modification does not lead to additional undesirable sequences.
[0057] (4) A ribosome binding site is added to the N-terminus.
[0058] (5) A stop codon is added.
[0059] (6) Codons coding for amino acids prone to undesirable post-translational modifications are mutated, such as changing protein surface exposed lysine codons to arginine codons to prevent protein ubiquitination.

[0060] Enzyme variations may also result from mutations introduced into the DNA and amino acid sequences to prevent or promote post translational modifications of the protein. Nonlimiting examples of post translational modifications include phosphorylation, acetylation, methylation, SUMOylation, ubiquitination, proteolytic cleavage, lipidation, including prenylation such as farnesylation or myristoylation, glycosylation, nitrosylation and biotinylation.

[0061] In various embodiments, the gene for the PT enzyme is derived from a fungus. It is envisioned that a PT from any fungus now known or later discovered can be utilized in the present invention. This includes but is not limited to the phyla Chytridiomycota, Basidiomycota, Ascomycota, Blastocladiomycota, Ascomycota, Microsporidia, Basidiomycota, Glomeromycota, Symbiomycota, and Neocallimastigomycota. For example, the fungus can be from the phylum Ascomycota, including classes, orders, families and genera Pezizomycotina, Arthoniomycetes, Colletotrichum, Coniocybomycetes, Clavicipitaceae, Dothideomycetes, Eurotiomycetes, Geoglossomycetes, Glomerellales, Hypocreales Laboulbeniomycetes, Lecanoromycetes, Leotiomycetes, Lichinomycetes, Orbiliomycetes, Pezizomycetes, Sordariomycetes, Xylonomycetes, Lahmiales, Itchiclahmadion, Triblidiales, Saccharomycotina, Saccharomycetes, Stachybotryaceae, Taphrinomycotina, Archaeorhizomyces, Neolectomycetes, Pneumocystidomycetes, Schizosaccharomycetes, and Taphrinomycetes; phylum Basidiomycota including subphyla or classes Pucciniomycotina, Ustilaginomycotina, Wallemiomycetes, and Entorrhizomycetes; subphylum Agaricomycotina including classes Tremellomycetes, Dacrymycetes, and Agaricomycetes; phylum Symbiomycota, including class Entorrhizomycota; subphylum Ustilaginomycotina including classes Ustilaginomycetes and Exobasidiomycetes; phylum Glomeromycota including classes Archaeosporomycetes, Glomeromycetes, and Paraglomeromycetes; subphylum Pucciniomycotina including orders and classes: Pucciniomycotina, Cystobasidiomycetes, Agaricostilbomycetes, Microbotryomycetes, Atractiellomycetes, Classiculomycetes, Mixiomycetes, and Cryptomycocolacomycetes; subphylum incertae sedis Mucoromyceta including orders Calcarisporiellomycota and Mucoromycota; phylum Mortierellomyceta including class Mortierellomycota; subphylum incertae sedis Entomophthoromycotina including order Entomophthorales; phylum Zoopagomyceta including classes Basidiobolomycota, Entomophthoromycota, Kickxellomycota, and Zoopagomycotina; subphylum incertae sedis Mucoromycotina including orders Mucorales, Endogonales, and Mortierellales; phylum Neocallimastigomycota including class Neocallimastigomycetes; phylum Blastocladiomycota including classes Physodermatomycetes and Blastocladiomycetes; phylum Rozellomyceta including classes Rozellomycota and Microsporidia; phylum Aphelidiomyceta including class Aphelidiomycota; Chytridiomyceta including classes Chytridiomycetes and Monoblepharidomycetes; and phylum Oomycota including classes or orders Leptomitales, Myzocytiopsidales, Olpidiopsidales, Peronosporales, Pythiales, Rhipidiales, Salilagenidiales, Saprolegniales, Sclerosporales, Anisolpidiales, Lagenismatales, Rozellopsidales, and Haptoglossales.

[0062] Specific modified fungal PT enzymes presented herein have the capacity to synthesize cannabinoids such as CBGA in a recombinant host. SEQ ID NOs: 1-135 are codon optimized nucleic acid sequences encoding modified fungal PTs having amino acid sequences SEQ ID NOs: 136-270 (Table 1).

TABLE 1

Fungal PT Genes for Nucleic Acids Corresponding to the Encoded Isolated Proteins

| | | |
|---|---|---|
| Shorthand | Codon Optimized Nucleic Acid Sequence | Amino Acid Sequence for Isolated Protein |
| FungalPT1 | SEQ. ID NO: 1 | SEQ. ID NO: 136 |
| FungalPT2 | SEQ. ID NO: 2 | SEQ. ID NO: 137 |
| FungalPT3 | SEQ. ID NO: 3 | SEQ. ID NO: 138 |
| FungalPT4 | SEQ. ID NO: 4 | SEQ. ID NO: 139 |
| FungalPT5 | SEQ. ID NO: 5 | SEQ. ID NO: 140 |
| FungalPT6 | SEQ. ID NO: 6 | SEQ. ID NO: 141 |
| FungalPT7 | SEQ. ID NO: 7 | SEQ. ID NO: 142 |
| FungalPT8 | SEQ. ID NO: 8 | SEQ. ID NO: 143 |
| FungalPT9 | SEQ. ID NO: 9 | SEQ. ID NO: 144 |
| FungalPT10 | SEQ. ID NO: 10 | SEQ. ID NO: 145 |
| FungalPT11 | SEQ. ID NO: 11 | SEQ. ID NO: 146 |
| FungalPT12 | SEQ. ID NO: 12 | SEQ. ID NO: 147 |
| FungalPT13 | SEQ. ID NO: 13 | SEQ. ID NO: 148 |
| FungalPT14 | SEQ. ID NO: 14 | SEQ. ID NO: 149 |
| FungalPT15 | SEQ. ID NO: 15 | SEQ. ID NO: 150 |
| FungalPT16 | SEQ. ID NO: 16 | SEQ. ID NO: 151 |
| FungalPT17 | SEQ. ID NO: 17 | SEQ. ID NO: 152 |
| FungalPT18 | SEQ. ID NO: 18 | SEQ. ID NO: 153 |
| FungalPT19 | SEQ. ID NO: 19 | SEQ. ID NO: 154 |
| FungalPT20 | SEQ. ID NO: 20 | SEQ. ID NO: 155 |
| FungalPT21 | SEQ. ID NO: 21 | SEQ. ID NO: 156 |
| FungalPT22 | SEQ. ID NO: 22 | SEQ. ID NO: 157 |
| FungalPT23 | SEQ. ID NO: 23 | SEQ. ID NO: 158 |
| FungalPT24 | SEQ. ID NO: 24 | SEQ. ID NO: 159 |
| FungalPT25 | SEQ. ID NO: 25 | SEQ. ID NO: 160 |
| FungalPT26 | SEQ. ID NO: 26 | SEQ. ID NO: 161 |
| FungalPT27 | SEQ. ID NO: 27 | SEQ. ID NO: 162 |
| FungalPT28 | SEQ. ID NO: 28 | SEQ. ID NO: 163 |
| FungalPT29 | SEQ. ID NO: 29 | SEQ. ID NO: 164 |
| FungalPT30 | SEQ. ID NO: 30 | SEQ. ID NO: 165 |
| FungalPT31 | SEQ. ID NO: 31 | SEQ. ID NO: 166 |
| FungalPT32 | SEQ. ID NO: 32 | SEQ. ID NO: 167 |
| FungalPT33 | SEQ. ID NO: 33 | SEQ. ID NO: 168 |
| FungalPT34 | SEQ. ID NO: 34 | SEQ. ID NO: 169 |
| FungalPT35 | SEQ. ID NO: 35 | SEQ. ID NO: 170 |
| FungalPT36 | SEQ. ID NO: 36 | SEQ. ID NO: 171 |
| FungalPT37 | SEQ. ID NO: 37 | SEQ. ID NO: 172 |
| FungalPT38 | SEQ. ID NO: 38 | SEQ. ID NO: 173 |
| FungalPT39 | SEQ. ID NO: 39 | SEQ. ID NO: 174 |
| FungalPT40 | SEQ. ID NO: 40 | SEQ. ID NO: 175 |
| FungalPT41 | SEQ. ID NO: 41 | SEQ. ID NO: 176 |
| FungalPT42 | SEQ. ID NO: 42 | SEQ. ID NO: 177 |
| FungalPT43 | SEQ. ID NO: 43 | SEQ. ID NO: 178 |
| FungalPT44 | SEQ. ID NO: 44 | SEQ. ID NO: 179 |
| FungalPT45 | SEQ. ID NO: 45 | SEQ. ID NO: 180 |
| FungalPT46 | SEQ. ID NO: 46 | SEQ. ID NO: 181 |
| FungalPT47 | SEQ. ID NO: 47 | SEQ. ID NO: 182 |
| FungalPT48 | SEQ. ID NO: 48 | SEQ. ID NO: 183 |
| FungalPT49 | SEQ. ID NO: 49 | SEQ. ID NO: 184 |
| FungalPT50 | SEQ. ID NO: 50 | SEQ. ID NO: 185 |
| FungalPT51 | SEQ. ID NO: 51 | SEQ. ID NO: 186 |
| FungalPT52 | SEQ. ID NO: 52 | SEQ. ID NO: 187 |
| FungalPT53 | SEQ. ID NO: 53 | SEQ. ID NO: 188 |
| FungalPT54 | SEQ. ID NO: 54 | SEQ. ID NO: 189 |
| FungalPT55 | SEQ. ID NO: 55 | SEQ. ID NO: 190 |
| FungalPT56 | SEQ. ID NO: 56 | SEQ. ID NO: 191 |
| FungalPT57 | SEQ. ID NO: 57 | SEQ. ID NO: 192 |
| FungalPT58 | SEQ. ID NO: 58 | SEQ. ID NO: 193 |
| FungalPT59 | SEQ. ID NO: 59 | SEQ. ID NO: 194 |
| FungalPT60 | SEQ. ID NO: 60 | SEQ. ID NO: 195 |
| FungalPT61 | SEQ. ID NO: 61 | SEQ. ID NO: 196 |
| FungalPT62 | SEQ. ID NO: 62 | SEQ. ID NO: 197 |
| FungalPT63 | SEQ. ID NO: 63 | SEQ. ID NO: 198 |
| FungalPT64 | SEQ. ID NO: 64 | SEQ. ID NO: 199 |
| FungalPT65 | SEQ. ID NO: 65 | SEQ. ID NO: 200 |
| FungalPT66 | SEQ. ID NO: 66 | SEQ. ID NO: 201 |
| FungalPT67 | SEQ. ID NO: 67 | SEQ. ID NO: 202 |
| FungalPT68 | SEQ. ID NO: 68 | SEQ. ID NO: 203 |
| FungalPT69 | SEQ. ID NO: 69 | SEQ. ID NO: 204 |
| FungalPT70 | SEQ. ID NO: 70 | SEQ. ID NO: 205 |
| FungalPT71 | SEQ. ID NO: 71 | SEQ. ID NO: 206 |
| FungalPT72 | SEQ. ID NO: 72 | SEQ. ID NO: 207 |
| FungalPT73 | SEQ. ID NO: 73 | SEQ. ID NO: 208 |
| FungalPT74 | SEQ. ID NO: 74 | SEQ. ID NO: 209 |
| FungalPT75 | SEQ. ID NO: 75 | SEQ. ID NO: 210 |
| FungalPT76 | SEQ. ID NO: 76 | SEQ. ID NO: 211 |
| FungalPT77 | SEQ. ID NO: 77 | SEQ. ID NO: 212 |
| FungalPT78 | SEQ. ID NO: 78 | SEQ. ID NO: 213 |
| FungalPT79 | SEQ. ID NO: 79 | SEQ. ID NO: 214 |
| FungalPT80 | SEQ. ID NO: 80 | SEQ. ID NO: 215 |
| FungalPT81 | SEQ. ID NO: 81 | SEQ. ID NO: 216 |
| FungalPT82 | SEQ. ID NO: 82 | SEQ. ID NO: 217 |
| FungalPT83 | SEQ. ID NO: 83 | SEQ. ID NO: 218 |
| FungalPT84 | SEQ. ID NO: 84 | SEQ. ID NO: 219 |
| FungalPT85 | SEQ. ID NO: 85 | SEQ. ID NO: 220 |
| FungalPT86 | SEQ. ID NO: 86 | SEQ. ID NO: 221 |
| FungalPT87 | SEQ. ID NO: 87 | SEQ. ID NO: 222 |
| FungalPT88 | SEQ. ID NO: 88 | SEQ. ID NO: 223 |
| FungalPT89 | SEQ. ID NO: 89 | SEQ. ID NO: 224 |
| FungalPT90 | SEQ. ID NO: 90 | SEQ. ID NO: 225 |
| FungalPT91 | SEQ. ID NO: 91 | SEQ. ID NO: 226 |
| FungalPT92 | SEQ. ID NO: 92 | SEQ. ID NO: 227 |
| FungalPT93 | SEQ. ID NO: 93 | SEQ. ID NO: 228 |
| FungalPT94 | SEQ. ID NO: 94 | SEQ. ID NO: 229 |
| FungalPT95 | SEQ. ID NO: 95 | SEQ. ID NO: 230 |
| FungalPT96 | SEQ. ID NO: 96 | SEQ. ID NO: 231 |
| FungalPT97 | SEQ. ID NO: 97 | SEQ. ID NO: 232 |
| FungalPT98 | SEQ. ID NO: 98 | SEQ. ID NO: 233 |
| FungalPT99 | SEQ. ID NO: 99 | SEQ. ID NO: 234 |
| FungalPT100 | SEQ. ID NO: 100 | SEQ. ID NO: 235 |
| FungalPT101 | SEQ. ID NO: 101 | SEQ. ID NO: 236 |
| FungalPT102 | SEQ. ID NO: 102 | SEQ. ID NO: 237 |
| FungalPT103 | SEQ. ID NO: 103 | SEQ. ID NO: 238 |
| FungalPT104 | SEQ. ID NO: 104 | SEQ. ID NO: 239 |
| FungalPT105 | SEQ. ID NO: 105 | SEQ. ID NO: 240 |
| FungalPT106 | SEQ. ID NO: 106 | SEQ. ID NO: 241 |
| FungalPT107 | SEQ. ID NO: 107 | SEQ. ID NO: 242 |
| FungalPT108 | SEQ. ID NO: 108 | SEQ. ID NO: 243 |
| FungalPT109 | SEQ. ID NO: 109 | SEQ. ID NO: 244 |
| FungalPT110 | SEQ. ID NO: 110 | SEQ. ID NO: 245 |
| FungalPT111 | SEQ. ID NO: 111 | SEQ. ID NO: 246 |
| FungalPT112 | SEQ. ID NO: 112 | SEQ. ID NO: 247 |
| FungalPT113 | SEQ. ID NO: 113 | SEQ. ID NO: 248 |
| FungalPT114 | SEQ. ID NO: 114 | SEQ. ID NO: 249 |
| FungalPT115 | SEQ. ID NO: 115 | SEQ. ID NO: 250 |
| FungalPT116 | SEQ. ID NO: 116 | SEQ. ID NO: 251 |
| FungalPT117 | SEQ. ID NO: 117 | SEQ. ID NO: 252 |
| FungalPT118 | SEQ. ID NO: 118 | SEQ. ID NO: 253 |
| FungalPT119 | SEQ. ID NO: 119 | SEQ. ID NO: 254 |
| FungalPT120 | SEQ. ID NO: 120 | SEQ. ID NO: 255 |
| FungalPT121 | SEQ. ID NO: 121 | SEQ. ID NO: 256 |
| FungalPT122 | SEQ. ID NO: 122 | SEQ. ID NO: 257 |
| FungalPT123 | SEQ. ID NO: 123 | SEQ. ID NO: 258 |
| FungalPT124 | SEQ. ID NO: 124 | SEQ. ID NO: 259 |
| FungalPT125 | SEQ. ID NO: 125 | SEQ. ID NO: 260 |
| FungalPT126 | SEQ. ID NO: 126 | SEQ. ID NO: 261 |
| FungalPT127 | SEQ. ID NO: 127 | SEQ. ID NO: 262 |
| FungalPT128 | SEQ. ID NO: 128 | SEQ. ID NO: 263 |
| FungalPT129 | SEQ. ID NO: 129 | SEQ. ID NO: 264 |
| FungalPT130 | SEQ. ID NO: 130 | SEQ. ID NO: 265 |
| FungalPT131 | SEQ. ID NO: 131 | SEQ. ID NO: 266 |
| FungalPT132 | SEQ. ID NO: 132 | SEQ. ID NO: 267 |
| FungalPT133 | SEQ. ID NO: 133 | SEQ. ID NO: 268 |
| FungalPT134 | SEQ. ID NO: 134 | SEQ. ID NO: 269 |
| FungalPT135 | SEQ. ID NO: 135 | SEQ. ID NO: 270 |

Homologous polynucleotide sequences, or complements thereof, having at least about 80%, 81%, 82%, 83%, 84%, 85%, 86%, 87%, 88%, 89%, 90%, 91%, 92%, 93%, 94%, 95%, 96%, 97%, 98%, 99% or 100% identity to the polynucleotide sequences listed sequences SEQ. ID NOs— 1-135 are also provided, including those that encode corresponding amino acid sequences SEQ ID NOs: 136-270, respectively, or having conservative amino acid substitutions. In some embodiments, the encoded PT comprises one or more conservative amino acid substitution that prevents or promotes post-translational modification of the PT. Examples of such post-translational modification is phosphorylation, acetylation, methylation, SUMOylation, ubiquitination, proteolytic cleavage, lipidation, prenylation such as farnesylation or myristoylation, glycosylation, nitrosylation, biotinylation, or any combination thereof.

[0063] In various embodiments, the nucleic acids further comprise additional nucleic acids encoding amino acids that are not part of the PT enzyme. In some of these embodiments, the additional sequences encode additional amino acids present when the nucleic acid is translated, encoding, for example, an additional protein domain, with or without a linker sequence, creating a fusion protein. Other examples are localization sequences, i.e., signals directing the localization of the folded protein to a specific subcellular compartment or membrane.

[0064] In some embodiments, the nucleic acids have, at the 5′ end, a nucleic acid encoding codon optimized cofolding peptides to create a fusion protein, e.g., having SEQ ID NOs:271-275 (Table 2), joining the sequences together to form a fusion polypeptide, e.g., having the amino acid sequence of SEQ ID NO:244-248 fused at the N terminus of the enzyme polypeptide, generating recombinant fusion polypeptides.

TABLE 2

| | | |
|---|---|---|
| NAME | Codon Optimized Nucleic Acid Sequence | Amino Acid Sequence for Isolated Protein |
| MBP | Seq. ID NO:271 | Seq. ID NO:276 |
| VEN | Seq. ID NO:272 | Seq. ID NO:277 |
| MST | Seq. ID NO:273 | Seq. ID NO:278 |
| OSP | Seq. ID NO:274 | Seq. ID NO:279 |
| OLE | Seq. ID NO:275 | Seq. ID NO:280 |

[0065] In some embodiments, the nucleic acid comprises additional nucleotide sequences that are not translated. Nonlimiting examples include promoters, terminators, barcodes, Kozak sequences, targeting sequences, and enhancer elements.

[0066] Expression of a gene encoding an enzyme is determined by the promoter controlling the gene. In order for a gene to be expressed, a promoter must be present within 1,000 nucleotides upstream of the gene. A gene is generally cloned under the control of a desired promoter. The promoter regulates the amount of enzyme expressed in the cell and also the timing of expression, or expression in response to external factors such as sugar source. Any promoter now known or later discovered can be utilized to drive the expression of the PT described herein.

[0067] In various embodiments, the nucleic acid encoding the PT is codon optimized for expression in yeast, for example a species of Saccharomyces, Candida, Pichia, Schizosaccharomyces, Scheffersomyces, Blakeslea, Rhodotorula, or Yarrowia. Such nucleic acids can usefully comprise a promoter functional in yeast. See e.g. http://parts.igem.org/Yeast for a listing of various yeast promoters. Exemplary yeast promoters known in the art are listed in Table 3 below drive strong expression, constant gene expression, medium or weak gene expression, or inducible gene expression. Inducible or repressible gene expression is dependent on the presence or absence of a certain molecule. For example, the GAL1, GAL7, and GAL10 promoters are activated by the presence of the sugar galactose and repressed by the presence of the sugar glucose. The HO promoter is active and drives gene expression only in the presence of the alpha factor peptide. The HXT1 promoter is activated by the presence of glucose while the ADH2 promoter is repressed by the presence of glucose.

TABLE 3

Exemplary yeast promoters

| | | |
|---|---|---|
| Strong constitutive promoters | Medium and weak constitutive promoters | Inducible/repressible promoters |
| TEF1 | STE2 | GAL1 |
| PGK1 | TPI1 | GAL7 |
| PGI1 | PYK1 | GAL10 |
| TDH3 | | HO |
| | | HXT1 |
| | | ADH2 |

[0068] In various embodiments, the nucleic acid is in an expression cassette, e.g., a yeast expression cassette. Any yeast expression cassette capable of expressing the enzyme in a yeast cell can be utilized. In some embodiments, the expression cassette consists of a nucleic acid encoding a PT with a promoter.

[0069] Additional regulatory elements can also be present in the expression cassette, including restriction enzyme cleavage sites, antibiotic resistance genes, integration sites, auxotrophic selection markers, origins of replication, and degrons.

[0070] The expression cassette can be present in a vector that, when transformed into a host cell, either integrates into chromosomal DNA or remains episomal in the host cell. Such vectors are well-known in the art. See e.g. http://parts.igem.org/Yeast for a listing of various yeast vectors.

[0071] A nonlimiting example of a yeast vector is a yeast episomal plasmid (YEp) that contains the pBluescript II SK(+) phagemid backbone, an auxotrophic selectable marker, yeast and bacterial origins of replication and multiple cloning sites enabling gene cloning under a suitable promoter. Other exemplary vectors include pRS series plasmids.

### Prenyltransferase Proteins

[0072] Additionally provided is a non-naturally occurring prenyltransferase (PT) having GOT PT activity. In various embodiments, the GOT PT comprises an amino acid sequence having at least 80%, 81%, 82%, 83%, 84%, 85%, 86%, 87%, 88%, 89%, 90%, 91%, 92%, 93%, 94%, 95%, 96%, 97%, 98%, 99% or 100% sequence identity or conservative amino acid substitutions to SEQ ID NOs: 136-270.

[0073] In some embodiments, the GOT PT is provided in vitro. In other embodiments, the GOT PT is expressed in a recombinant host cell, e.g., a microorganism or a plant such as tobacco or Arabidopsis thaliana. Nonlimiting examples of host cell microorganisms include any species of bacteria, including but not limited to Escherichia, Corynebacterium, Caulobacter, Pseudomonas, Streptomyces, Bacillus or Lactobacillus; any species of filamentous fungus, including but not limited to any species of Aspergillus, and a yeast, e.g., any species of Saccharomyces, Candida, Pichia, Schizosaccharomyces, Scheffersomyces, Blakeslea, Rhodotorula or Yarrowia

### Recombinant Host Cells

[0074] Further provided is a recombinant host cell of a microorganism or plant expressing a GOT PT, e.g., encoded by any of the above-described nucleic acids.

[0075] Referring to FIG. 2A, the recombinant PT may be added to the host cell by any technique known in the art, e.g., as described in Green and Sambrook, 2012. The host organism may also express enzymes designed to increase the amount of a precursor molecule, e.g., GPP. Those enzymes may be derived from any combination of the mevalonate (MEV) pathway or the MEP pathway (methyl erythritol phosphate) pathway, e.g., as described in U.S. Pat. Application 63/194121, U.S. Pat. Application 63/164126, U.S. Pat. Application 63/141486, and U.S. Pat. 11,041,002. Non-limiting examples of such enzymes are an olivetolic acid cyclase (OAC), a polyketide synthase, an olivetol synthase, a geranyl pyrophosphate synthase (GPPS), a malonate transporter, an aromatase, a dehydrogenase, an oxidase, a desaturase, a decarboxylase, a cannabinoid synthase including a THCA, a CBCA or a CBDA synthase, a cytochrome P450 (CYP-450), a cytochrome P450 reductase (CPR), or any combination thereof.

[0076] Examples of cannabinoids that may be produced in these host cells include cannabigerol (CBG), cannabigerolic acid (CBGA), cannabidiolic acid (CBDA), cannabichromene (CBC), cannabidivarin (CBCV), cannabichromenic acid (CBCA), cannabichromevarinic acid (CBCVA), cannabinol (CBN), 11-hydroxycannabinol (11-OH-CBN), cannabinerolic acid (CBNA), cannabivarin (CBV), 11-hydroxycannabivarin (11-OH-CBV), cannabinerovarinic acid (CBNVA), cannabigerophorolic acid (CBGPA), cannabigerovarinic acid (CBGVA), cannabigerogerovarinic acid (CBGGVA), tetrahydrocannabinol (THC), tetrahydrocannabinolic acid (THCA), 11-hydroxy tetrahydrocannabinol (11-OH-THC), tetrahydrocannabivarin (THCV), 11-hydroxy tetrahydrocannabivarin (11-OH-THCV), tetrahydrocannabivarin acid (THCVA), cannabinerovarinic acid (CBNVA), sesquicannabigerol (CBF), cannabigerogerol (CBGG), sesquicannabigerolic acid (CBFA), cannabigerogerolic acid (CBGGA), sesquicannabidiolic acid (CBDFA), sesquitetrahydrocannabinolic acid (THCFA), sesquicannabigerovarinic acid (CBFVA), sesquicannabichromenic acid (CBCFA), sesquicannabigerophorolic acid (CBFPA), cannabidiol (CBD), cannabidiolic acid (CBDA), cannabidivarinic acid (CBDVA), cannabidivarin (CBDV) or any combination thereof.

[0077] Cannabinoids can be produced in a heterologous cell along the pathway depicted in FIG. 2A. The methods for improving production of precursor molecules to the cannabinoids are realized by genetically modifying the host organism.

[0078] Referring to FIG. 4, DNA sequences are synthesized and cloned using techniques known in the art. Gene expression can be controlled by inducible or constitutive promoter systems using the appropriate expression vectors. Genes are transformed into an organism using standard transformation methods to generate modified host strains (i.e., the recombinant host organism). The modified strains which produce cannabinoid precursors express genes for one or more prenyltransferases, e.g., any of the GOT PTs described above, or a mixture of GOT PTs, e.g., from fungal or plant origin. Thus, one of skill in the art would recognize plant PT genes and enzymes can be linked in combination with the fungal PT genes and enzymes, such that the host cells can be transformed. The production of high value molecules in the host cells can also be determined by the methods herein. The modified strains from above can also co-express genes for downstream cannabinoids synthases, such as CBCA, THCA, and CBDA synthases, to produce additional cannabinoids compounds including but not limited to CBCA, CBCVA, CBC, THCA, THCVA, THCV, CBDA, CBDVA, CBD, etc., e.g., as described in US Provisional Patent Application 63/164126.

[0079] Thus, the host cell for producing cannabinoids can comprise one or more PT genes; a prenyl group acceptor; a prenyl group donor; and a reaction pathway for converting the prenyl group donor and the prenyl group acceptor to a first cannabinoid catalyzed by PT enzymes encoded by the PT genes.

[0080] The one or more PT genes may be inserted into and thereby integrated into the host cell and one or more PT genes are expressed. In some embodiments, the PT enzymes are at least 80% homologous to isolated amino acid sequences selected from SEQ. ID NOs: 136-270 which may be encoded by the PT genes having SEQ ID NOs:1-135, respectively.

[0081] In some embodiments, genetic alteration is achieved by: gene expression controlled by inducible promoter systems; natural or induced mutagenesis, recombination, and/or shuffling of genes, pathways, and whole cells performed sequentially or in cycles; overexpression and/or deletion of single or multiple genes; knockout mutations/alterations which reduce or eliminate parasitic pathways that reduce precursor concentration; and integrating vectors and PCR fragments into the host genome.

[0082] In other embodiments, the recombinant host cells of the recombinant organism are engineered to produce all precursor molecules necessary for the biosynthesis of cannabinoids, including but not limited to OA, OL and GPP, hexanoic acid, hexanoyl-CoA, malonic acid and malonyl-CoA, e.g., as disclosed in U.S. Pat. No. 10,435,727.

[0083] As discussed above, in some embodiments, the recombinant host cell is a yeast cell, e.g., a species of Saccharomyces, Candida, Pichia, Schizosaccharomyces, Scheffersomyces, Blakeslea, Rhodotorula, or Yarrowia.

[0084] Using the systems and methods herein, the genes which can be expressed to encode for a corresponding enzyme or other type of proteins include but are not limited to the fungal prenyltransferases (Fungal PT). For example, the Fungal PT gene is expressed, or overexpressed, to encode for the Fungal PT enzyme. Gene sequences can be determined using the techniques disclosed in U.S. Pat. 10,671,632.

[0085] In various embodiments, samples from fermentations of recombinant hosts expressing the cannabinoid pathway with the GOT PTs described above are: (i) prepared and extracted using a combination of fermentation, dissolution, and purification steps; and (ii) analyzed by HPLC for the presence of directing molecules, precursor molecules, intermediate molecules, and target molecules such as CBGA, CBGVA, THCA, and THCVA.

[0086] In specific embodiments, (a) the host cell produces a meroterpenoid; (b) a second reaction pathway converts the first cannabinoid to a second cannabinoid, as catalyzed by downstream enzymes, which in some embodiments are cannabinoid synthases; (c) the second cannabinoid is THCA, THCVA, CBDA, CBDVA, CBCA, CBCVA, CBGVA or CBGOA; (d) the prenyl donor is polyprenol diphosphate; (e) the prenyl acceptor is a 1,3-diphenol or diphenolic acid; (f) two or more fungal GOT PTs, or a mixture of fungal PTs and plant PTs are present in the host cell; enzymes which catalyze synthesis of the first cannabinoid.

### Methods of Producing Cannabinoids

[0087] The present invention is also directed to methods of catalyzing the condensation of a polyprenol diphosphate and an alkylresorcinol or alkylresorcyclic acid to yield a cannabinoid. The methods comprises combining the polyprenol diphosphate and the alkylresorcinol or alkylresorcyclic acid with any of the GOT PTs described above.

[0088] In some of these embodiments, the polyprenol diphosphate is geranyl pyrophosphate (GPP) or farnesyl pyrophosphate (FPP) or geranylgeranyl pyrophosphate (GGPP). In other embodiments, the alkylresorcinol or alkylresorcyclic acid is olivetol (OL) or olivetolic acid (OA), divarinolic acid, divarinol, orcinol, orsellinic acid, sphaerolic acid, sphaerophorol. In additional embodiments, the cannabinoid is cannabigerolic acid (CBGA), cannabigerol (CBG), or cannabigerovarinic acid (CBGVA).

[0089] The catalysis of these methods may be performed in vitro or in a recombinant microorganism or plant expressing the PT, as described above. In some of these embodiments, the microorganism is a yeast cell, e.g., a species of Saccharomyces, Candida, Pichia, Schizosaccharomyces, Scheffersomyces, Blakeslea, Rhodotorula, or Yarrowia.

[0090] In additional embodiments, the recombinant microorganism or plant also expresses a second PT, e.g., a fungal PT and a plant PT, as discussed above.

[0091] Also as discussed above, in some embodiments the recombinant microorganism or plant also expresses at least one other recombinant enzyme in a cannabinoid biosynthetic pathway. Nonlimiting examples of the at least one other recombinant enzyme is an olivetolic acid cyclase (OAC), a polyketide synthase, an olivetol synthase, a geranyl pyrophosphate synthase (GPPS), a malonate transporter, an aromatase, a dehydrogenase, an oxidase, a desaturase, a decarboxylase, a cannabinoid synthase including a THCA, a CBCA or a CBDA synthase, a cytochrome P450 (CYP-450), a cytochrome P450 reductase (CPR), or any combination thereof.

[0092] Preferred embodiments are described in the following examples. Other embodiments within the scope of the claims herein will be apparent to one skilled in the art from consideration of the specification or practice of the invention as disclosed herein. It is intended that the specification, together with the examples, be considered exemplary only, with the scope and spirit of the invention being indicated by the claims, which follow the examples.

### Example 1 - Construction of Recombinant Saccharomyces Cerevisiae Strain Expressing a Fungal Prenyltransferase

[0093] Construction of Saccharomyces cerevisiae strains expressing a PT with GOT activity derived from a fungal PT for meroterpenoid compound production, such as CBGA, is carried out by cloning the fungal PT into vectors with the proper regulatory elements for gene expression (e.g. promoter, terminator). As an alternative to expression from an episomal plasmid, the PT gene is inserted into the recombinant host genome. Integration is achieved by a single cross-over insertion event of the plasmid. Strains with the integrated gene can be screened by rescue of auxotrophy and genome sequencing.

### Example 2 - Expression of a Mixed Prenyltransferase Pathway for Cannabinoid Production in a Modified Host Organism

[0094] A recombinant Saccharomyces cerevisiae host is modified to express multiple PT genes, as illustrated in FIG. 4. A mixture of different PT genes derived from fungi can be expressed, or a mixture of plant-derived PT genes can be expressed along with fungi-derived PT genes in the modified host. Non-limiting examples of plant derived PT genes include those corresponding to GenBank Accession Identification Numbers MO431418.1, PK28436, PK02092, PK17697, PK15523, PK11068, PK13891, PK29226, and PK07278. The optimized genes can be cloned into vectors with the proper regulatory elements for gene expression (e.g. promoter and terminator) and the derived plasmid can be confirmed by DNA sequencing. As an alternative to expression from an episomal plasmid, the optimized PT genes are inserted into the recombinant host genome. Integration is achieved by a single cross-over insertion event of the plasmids. Strains with the integrated genes can be screened by rescue of auxotrophy and genome sequencing.

### Example 3 - Expression of Fungal Cannabinoid Pathway in Conjunction With Downstream Cannabinoid Synthases

[0095] Construction of a modified Saccharomyces cerevisiae host is carried out by co-expressing downstream cannabinoid synthases with (i) a fungal-derived PT enzyme, (ii) a mixture of fungal-derived PT enzymes, or (iii) a mixture of fungal derived PT enzymes and plant-derived PT enzymes, as shown in FIG. 4. The recombinant fungal and mixed cannabinoid pathways provide precursors, such as CBGVA, CBGA, and other primary cannabinoids, for downstream cannabinoids synthases to act on. Downstream cannabinoid synthases can include genes encoding for enzymes functioning as THCA synthase, CBDA synthase, CBCA synthase, or other secondary or tertiary cannabinoids. From a primary cannabinoid derived from olivetolic acid (OA) or olivetol (OL), such as CBGA or CBG, downstream cannabinoid synthases may yield THCA, CBDA, CBCA, CBD, CBC, etc. From a primary cannabinoid derived from divarinic acid (DA) or divarinol (DL) such as CBGVA or CBGV, downstream cannabinoid synthases may yield THCVA, THCV, CBDVA, CBDV, CBCVA, CBCV, etc. From a primary cannabinoid derived from orsellinic acid or orcinol, such as CBGOA or CBGO, downstream cannabinoid synthases may yield THCOA, THCO, CBDOA, CBDO, CBCOA, CBCO, etc. From a primary cannabinoid derived from 5-heptylresorcinolic acid (sphaerophorolic acid) or 5-heptylresorcinol (sphaerophorol) such as CBGPA or CBGP, downstream cannabinoid synthases may yield THCPA, THCP, CBDPA, CBDP, CBCPA, CBCP, etc. The optimized downstream cannabinoid synthase genes are synthesized using DNA synthesis techniques known in the art and expressed in a modified host as referenced, as described in PCT Patent Application PCT/US21/36031. Strains with fungal PT and mixed PT pathways co-expressing downstream cannabinoid synthase genes can be screened by rescue of auxotrophy and genome sequencing.

### Example 4 - Method of Growth

[0096] Modified host cells which yield cannabinoids, such as the cannabinoids produced by the fungal and mixed PT enzymes described herein, express engineered (i) a fungal-derived PT, (ii) a mixture of fungal-derived PTs, or (iii) a mixture of fungal-derived PTs and plant derived PTs. More specifically, the cannabinoid-producing strain herein is grown in a feedstock as described in U.S. Pat. Application No. 17/068636. An example feedstock use for a modified host expressing the fungal cannabinoid pathway would be growing the strain in a minimal-complete or rich culture media containing yeast nitrogen base, amino acids, vitamins, ammonium sulfate, and a carbon source, such as glucose or molasses. The feedstock is consumed by the modified host which expresses the fungal cannabinoid pathway to convert the feedstock into (i) biomass, (ii) cannabinoids, and (iii) biomass and cannabinoids. Strains expressing the fungal cannabinoid pathway can be grown on feedstock for 12 to 160 hours at 25-37° C. for isolation of the cannabinoid products.

### Example 5 - Detection of Isolated Product

[0097] To identify fermentation-derived cannabinoids, such as CBGA, CBGVA, THCVA, THCA, THCV etc. and all other products of a recombinant host expressing an engineered biosynthetic pathway for cannabinoids (see FIGS. 5,6,7 and 8), an Agilent 1100 series liquid chromatography (LC) system equipped with a reverse phase C18 column (Agilent Eclipse Plus C18, Santa Clara, CA, USA) is used. A gradient is used of mobile phase A (ultraviolet (UV) grade H2O + 0.1% formic acid) and mobile phase B (UV grade acetonitrile + 0.1% formic acid). Column temperature is set at 30° C. Compound absorbance is measured at 210 nm and 305 nm using a diode array detector (DAD) and spectral analysis from 200 nm to 400 nm wavelengths. A 0.1 mg/mL analytical standard is made from certified reference material for each cannabinoid (Cayman Chemical Company, USA). Each sample is prepared by diluting fermentation biomass from a recombinant host expressing the engineered biosynthesis pathway 1:3 or 1:20 in 100% acetonitrile and filtered in 0.2 um nanofilter vials. The retention time and UV-visible absorption spectrum (i.e., spectral fingerprint) of the samples are compared to the analytical standard retention time and UV-visible spectra (i.e. spectral fingerprint) when identifying the cannabinoid compounds.

[0098] For example, FIG. 5 depicts the detection of CBGA isolated from fermentation with a recombinant host expressing recombinant fungal derived enzymes for CBGA production from OA and GPP. Detection and isolation are depicted by retention time matching of fermentation derived CBGA (middle panel) with a CBGA analytical standard (top panel), along with a matching UV-vis spectral fingerprint of the fermentation derived CBGA with the CBGA analytical standard. This also corroborates that the recombinant host is able to successfully convert OA and GPP to CBGA, which further validates that the systems and methods herein direct molecules into cannabinoid pathways. A negative control (bottom panel), from a strain not expressing the fungal cannabinoid pathway, does not yield CBGA, as seen by no product isolated at the retention time of the CBGA analytical standard, nor a matching UV-vis spectral fingerprint with the analytical standard. This shows selectivity in the isolation and the necessity of expressing the fungal cannabinoid pathway for producing cannabinoid in the modified host strain.

[0099] As another example, in FIG. 6, a strain expressing the mixed prenyltransferase cannabinoid pathway diagrammed in FIG. 3 produces CBGA which can be identified and isolated from a fermentation of the modified host. Both retention time and UV-vis absorption spectra (i.e. spectral fingerprint) are identical between the fermentation derived CBGA and the CBGA analytical standard.

[0100] FIG. 7 depicts the production, detection, and isolation of the downstream cannabinoid, THCA, from a fermentation of a modified recombinant host expressing the fungal cannabinoid pathway along with a downstream cannabinoid synthase. The retention time and UV-vis spectral absorption (i.e. spectral fingerprint) of the THCA isolated from fermentation is identical to the retention time and UV-vis spectral absorption (i.e. spectral fingerprint) of the THCA analytical standard. The modified host strain expressing the fungal and downstream cannabinoid pathway is able to produce THCA.

[0101] FIG. 8 depicts the production, isolation, and identification of variant cannabinoids, CBGVA, the precursor to THCVA, and THCVA / THCV derived from a fermentation of a recombinant host co-expressing the fungal pathway for cannabinoids and downstream cannabinoid synthases. The primary cannabinoid CBGVA is shown in the left panel. The co-expressed downstream cannabinoid synthase converts CBGVA to a secondary cannabinoid THCVA /THCV, which is identified by matching retention times with the THCVA analytical standard. Spectral library identification of the fermentation derived THCVA matches the UV-vis absorption spectrum of the THCVA analytical standard.

### REFERENCES

[0102] Carvalho et al., 2017, FEMS Yeast Res. 17:fox037.
[0103] Committee on the Health Effects of Marijuana, 2017, The Health Effects of Cannabis and Cannabinoids: The Current State of Evidence and Recommendations for Research, National Academies Press.
[0104] Gülck and Møller, 2020, Trends in Plant Science 25:985-1004.
[0105] Green and Sambrook, 2012, Molecular Cloning: A Laboratory Manual (Fourth Edition), Cold Spring Harbor Laboratory Press, Cold Spring Harbor, N.Y.
[0106] Luo et al., 2019, Nature 567:123-126.
[0107] U.S. Pat. No. 10,435,727.
[0108] U.S. Pat. No. 10,671,632.
[0109] U.S. Pat. No. 11,041,002.
[0110] U.S. Pat. Application 16/553103.
[0111] U.S. Pat. Application 16/553120.
[0112] U.S. Pat. Application 16/558973.
[0113] U.S. Pat. Application 17/068636.
[0114] U.S. Provisional Pat. Application 63/035692.
[0115] U.S. Provisional Pat. Application 63/053539.
[0116] U.S. Provisional Pat. Application 63/141486.
[0117] U.S. Provisional Pat. Application 63/164126.
[0118] U.S. Provisional Pat. Application 63/194121.
[0119] U.S. Pat. Application Publication 2020/0063170.
[0120] U.S. Pat. Application Publication 2020/0063171.
[0121] http://parts.igem.org/Yeast

[0122] In view of the above, it will be seen that several objectives of the invention are achieved and other advantages attained.

[0123] As various changes could be made in the above methods and compositions without departing from the scope of the invention, it is intended that all matter contained in the above description and shown in the accompanying drawings shall be interpreted as illustrative and not in a limiting sense.

[0124] All references cited in this specification, including but not limited to patent publications and non-patent literature, and references cited therein, are hereby incorporated by reference. The discussion of the references herein is intended merely to summarize the assertions made by the authors and no admission is made that any reference constitutes prior art. Applicants reserve the right to challenge the accuracy and pertinence of the cited references.

[0125] As used herein, in particular embodiments, the terms “about” or “approximately” when preceding a numerical value indicates the value plus or minus a range of 10%. Where a range of values is provided, it is understood that each intervening value, to the tenth of the unit of the lower limit unless the context clearly dictates otherwise, between the upper and lower limit of that range and any other stated or intervening value in that stated range is encompassed within the disclosure. That the upper and lower limits of these smaller ranges can independently be included in the smaller ranges is also encompassed within the disclosure, subject to any specifically excluded limit in the stated range. Where the stated range includes one or both of the limits, ranges excluding either or both of those included limits are also included in the disclosure.

[0126] The indefinite articles “a” and “an,” as used herein in the specification and in the embodiments, unless clearly indicated to the contrary, should be understood to mean “at least one.”

[0127] The phrase “and/or,” as used herein in the specification and in the embodiments, should be understood to mean “either or both” of the elements so conjoined, i.e., elements that are conjunctively present in some cases and disjunctively present in other cases. Multiple elements listed with “and/or” should be construed in the same fashion, i.e., “one or more” of the elements so conjoined. Other elements can optionally be present other than the elements specifically identified by the “and/or” clause, whether related or unrelated to those elements specifically identified. Thus, as a non-limiting example, a reference to “A and/or B”, when used in conjunction with open-ended language such as “comprising” can refer, in one embodiment, to A only (optionally including elements other than B); in another embodiment, to B only (optionally including elements other than A); in yet another embodiment, to both A and B (optionally including other elements); etc.

[0128] As used herein in the specification and in the embodiments, “or” should be understood to have the same meaning as “and/or” as defined above. For example, when separating items in a list, “or” or “and/or” shall be interpreted as being inclusive, i.e., the inclusion of at least one, but also including more than one, of a number or list of elements, and, optionally, additional unlisted items. Only terms clearly indicated to the contrary, such as “only one of” or “exactly one of,” or, when used in the embodiments, “consisting of,” will refer to the inclusion of exactly one element of a number or list of elements. In general, the term “or” as used herein shall only be interpreted as indicating exclusive alternatives (i.e. “one or the other but not both”) when preceded by terms of exclusivity, such as “either,” “one of,” “only one of,” or “exactly one of.” “Consisting essentially of,” when used in the embodiments, shall have its ordinary meaning as used in the field of patent law.

[0129] As used herein in the specification and in the embodiments, the phrase “at least one,” in reference to a list of one or more elements, should be understood to mean at least one element selected from any one or more of the elements in the list of elements, but not necessarily including at least one of each and every element specifically listed within the list of elements and not excluding any combinations of elements in the list of elements. This definition also allows that elements can optionally be present other than the elements specifically identified within the list of elements to which the phrase “at least one” refers, whether related or unrelated to those elements specifically identified. Thus, as a non-limiting example, “at least one of A and B” (or, equivalently, “at least one of A or B,” or, equivalently “at least one of A and/or B”) can refer, in one embodiment, to at least one, optionally including more than one, A, with no B present (and optionally including elements other than B); in another embodiment, to at least one, optionally including more than one, B, with no A present (and optionally including elements other than A); in yet another embodiment, to at least one, optionally including more than one, A, and at least one, optionally including more than one, B (and optionally including other elements); etc.

The application's sequence listing, which the Patent Office published only in electronic form, follows.

SEQUENCE LISTING (279 sequences)

SEQ ID NO: 1 - DNA, 1023 bp, Artificial Sequence
  Description of Artificial Sequence: Synthetic polynucleotide
  FungalPT_1
atggatgaggtaaaaggttacaataaaccttcccacggacttttccgttttatccctgatgcatgggttccgtatgctgaactgatgaggctggatcgtcaatctggtttttgggcgttttattggcattacttaattggactgggattcgcaataaatatcccaccttttagctccgaaatagacttgaaggcattggtgctacttgcggcctatttagggttgtggaccactgtattcaggggaataacatgtacatggaacgacaacctggatcaggacttcgatcgtcaagtcgctagatgcagagtaaggccaattcctcgtggggcggtgacaaccggacaagcacactttttcactgcgatgcagatcgcagttggcacttgcatattgtaccctttcagtgatagcacgttgattcacgcgacggtggatggtgttttgctattcatttatcctttgttaaaaagatgcactaactacccacaagtcgagttggggttcgggttgtcatacgctatctttctggtaactgcgatggttggaaaggaccctctgaggcctttattagaccctagtttggatctaagcgccagggtggctaaagtcatagaggcaccgttagcccaaagcgcagcgtgcctgtatgtagctggtataatatggaccataatttttgatactatatacgcgcatcaggattatgtagatgatttaaaggctggtgtacgtggactagccgtgagattggggcgtaggggcacaaagcccgcctgttacatagcgacggcggtccagctttacttcttagttttagcgggtcaactagcggggtttggggcctcttactatgcgatttcctgcggggtcacggcattacttctaactaggatgatatgggtggtggacctggaggacggggattcttgcgcgtgggcatttgggccagggtcagggtatgtcggcactgcaattagcgcgggtttcttagctgactttttcagcaagaaatatggctat

SEQ ID NO: 2 - DNA, 975 bp, Artificial Sequence
  Description of Artificial Sequence: Synthetic polynucleotide
  FungalPT_2
atggcccccaggacgtcaacggcccaagggagatatacaccacccaccaagggcattttatctaagctaccagcgtcctgggtcccatacgctgaactaatcaggctggaacagccgcacggtatatacatgatttatttcccgcatatagttggtttaatgtacgcttgctccgcgagacctagtgcagtaccggcgcacgaactagcccatcgtcttgtagtcttctttgtgtggaccttctttatgcgtggagcgggttgtgcttggaatgacatcaccgatcaagatttcgacaggaaaactgaaaggtgtaggaatcgtccggttgcgcgtggcgcaatatcaacaacccaaggtcacatatatactctagtcctgactgctctgggctttttgacattacaaaccctgcctgttgaatgtaccttgtgtgcattagccacggctgtgttaaccatcatctacccgtttgggaagaggtttaccaactttgcccaggttattttggggtccactttagcctcaacgattgccttgtcagcttatgctgttgaactaccagccttatcccctgggtacgtagttccgacgctttgccttactgccacgattttattgttagttgtattttacgacacgatatatgctagacaggatactgccgacgacctaaaaaccggagtaaagggaatggcagtgctatttaggaatcacatcgaaactttgttggcagtgcttgcgttatcaatcgccggtcttcttgctacaacgggaacgcttcttaacatgggtccgtatttcttcgctttcagcgtcgttgggctggcaacaggacttcttaccatgatagcgttgattcgttggcatcttttcccgtctttcgccaagtactctggatggttttatgctctagcgattgttaaccttcttggtggatgcgtggtggagtatcttaataaggcacctgctcta

SEQ ID NO: 3 - DNA, 966 bp, Artificial Sequence
  Description of Artificial Sequence: Synthetic polynucleotide
  FungalPT_3
atggtaagttctagggcaggcgagacgcaaccacttgtctgggggataagcgggaggggagggaacactagcacacgtccttctggtttttccctgaaagaatattggcgtctagcgagaatgcacaaattccccttcggttcaatccttatattttggccagcagcatggggctaccttttgggcgcccaggcggctaagccaggacccatagaattgactgtaactctagcagcacttcttttgtggtcaacgattttgcactctgctggctgtgtggttaatgatttatgtgacgtcgaatttgacagacaagttgaaaggacaaaacacagacctttggctgcgggaactgtgagtatcttcggtgcttgggtcttcatgttgctacaggtggtggcgcttggcttgttgttaaccttcgtaaataggaatgccgtgatctctggtgtgtttaacatttttcctctggcggcactttaccctctaatgaagcgtataacctggtggccgcaagcgtggttgggattagccatgaattgggggctgccgaccgcctggctaatggcatcccctaacgactataaatcaagtccgttatgggttttaatgtttggcatattttgttggacgatattctacgataccatatatgcttgtcaggacagaaaagacgatataaatgctggcgttcgtagtaccgcattactatttggcgactacgtgaaaccaatattagccatcttcggagcgatctttgtggcgactctggcatacgcgggtcaggcattaaatttaggcgcagagttctttattatctctgtcggcggatgtgccgtacacctgacgtggcagttagttacgcttgatgtcgaaaacccgaaggactgcggtgctagattcgttgctaacggtgacttgggatatattgtaacggcggggatgttagccacgtggttcttgcac

SEQ ID NO: 4 - DNA, 888 bp, Artificial Sequence
  Description of Artificial Sequence: Synthetic polynucleotide
  FungalPT_4
atgaggcaaccttggtggctggggtactggcagttggcaaggatgcacaaatttccggctggctccattctggtattctggccgtttacgtggggatacgtattgggggcccacgagaagcgtcccgagccattacaacttgtatatatcatggcggccttccttattggatctacgctgttacattgcgccgcttgcacaatcaatgacatttgcgatgtcaatttcgacagacaggtagagagatgtaagactcgtcccttggtggctggcaccgtaagtatgccgggtgcatggatcttctttttcctacagattgccgtccttttcggaatgctatcatttgtcaacaagaatgctttcttggcgggtacattcggtatattcccacttacaactgtgtacccccttatgaagagaattacatggtggccccaagcgtggctaggtttagctatgaactggggcttaccaactgcgtggctgatagcagctccacaagacgtcaaaagtgtcccaatgtggacacttacctttggtacgctatgttggacgatagtctatgatactatatatgcgtgtcaagatagaaaagatgacgtgaaagcgggtgtccgttctacggctgtcctgttcggcaattatgtcaagcccatattaagcctgttcgctgctgctttcgtggcggccctagcctacgcgggttacgagacgcatcagggctggatttactatgcggtaagtgttgggggatgtgcagcccaccttctatggcaattagtcactgtggacctggatgtgccggaacagtgctggcaaaagttccaatctaatggtaatctagggtacattgttttgggtgggatgttaggggagtggtatctttat

SEQ ID NO: 5 - DNA, 996 bp, Artificial Sequence
  Description of Artificial Sequence: Synthetic polynucleotide
  FungalPT_5
atgtcaactactcgtcgtagcgttacaaccagaccttcaacatcttcaagaaacgtgccgaggggtatatgggagttggcgcgtcttcatacaagagaatcctggctttgttggtatcctagcatatggggagcatgcgttgcggcgggtgtgtctgacacggtattggagccacttgcattcgcaaggtttttattcggtatatgggcatcagtgaccgcaactcactgcgcgttctgcacattcaagagtgttcctttttgtttctttgtggtgcccagatactcctctgactattggcacctagacaaacacgttcaaagatgcaaggttcgtcctctgccgagcggaatgatttctacccccgaggctctattagcatttgtgtgctgggttccgtttactttcgctataacctgggcgactcttggtccggcggtcaccgttagttttattccggtttgggtgctgagcgtgatatacccgttcatgaaaagattgatgccctttccgcaggttgtgttgggagcgataattggcggggccgtctttcctggatgggtgggagttacgggagacttggatcacctagaccaggcgctgccactgttcttcgcaactgcggcgtgggttgtatactttgacgttttctatgcgactcaggatcttcccgatgacaaaaaggccggtgtgagatccttggcggtatggatgggaccaaatgttaagatcttgttagccggattaggaattttgcagatcgctttctttgcaatgacagctttgagggccgacctttctcttatattttggatattggggatcggcgtctgggcagtgtctgttccctggcatgtactatccctgaatttgaaagaccgtcacagcgggggttcagtctttaaggccaatatcaagttgggtttgtacatgaccggggtgtcattgctagaacttgtgttactacgtgtccaccacgcgccaatgagagtatat

SEQ ID NO: 6 - DNA, 732 bp, Artificial Sequence
  Description of Artificial Sequence: Synthetic polynucleotide
  FungalPT_6
atggctcctcaagccaggaaccagaaaagtcaacacaatttggtcaaagggatatggcagttaatgagattgcataccatcgaaggactttctacagcaagcataggttggctcgcattgttcttctacgcaatccaacagcaagtctcctgggaagtcctgaagaatgtgtttcttgggctttttgctagttacgggataacacacggtatattttgcatgtggaatgatatctgtgatcgtaacttcgacgggcaggttgccaggacaaaacaacgtcccttacccagtgggatggtgacgctaacagaagcgataatagcattcattttgggtttcgccggtactatctcaatcacgtaccacctgttgggggaagacacaacaagggctatggttcctgcttgggttttatctttcatttaccccttatgtaaaagggctatatgggcgcctcaagtggtcttgggcttaacaatggcggcttgcgtcctaccgccctgggtcgccctgggaaatgattacactggtaacataacccttcctgcgtctctttttggtgctatttttagctggcttgtctacttggacttaatctacgcttcgcaggactccgtcgatgacaagaaagcgggggtgcgttctttagcagtgttcttgggggacaacttgaagggtggcctgaccgtattaggggtggctcaaatcgtatgcttcgtcttggctgaccgt

SEQ ID NO: 7 - DNA, 954 bp, Artificial Sequence
  Description of Artificial Sequence: Synthetic polynucleotide
  FungalPT_7
atgagttcctccttggctggtgaaaatcagacgctagtagctggcaaagtctatgttcccgcccagcccagctcattttcattccaggcttattggcagctggcgagaatgcatgagtttccagcggggagcatactgattttctggcctgccgcttggggctatttattgggcgctcatgcggcaaagccaggccatatccagttagccagcacgttagcgggccttttcgtatggtccactcttctacattccgcaggatgtgtactaaacgacatttgcgacgtagatttcgataggcaagtcgaaaggaccaagaagaggccactagcagcaggtcgtgttagcctgtttggcgcatgggtatttttccttattcagatggttgcgttagttgcaatgttaaccttcgttaaccacaacgcgctgatttcaggagccttcgggatattcccattagctacgctatatcccctgatgaaaagaataacttggtggccacaagcatggctagggttagcgatgaactggacgctaccaaccgcttggcttatagctagtccaaatgactataagtcttcccccatgtgggtattgacgtttggaactctatgttggacgatattttatgacacaatttacgcgtgtcaggaccgtaaggacgacatgaaggcgggcgtgcgttctacagctttgcttttcgggtcatatgttaaggagattttaagcgttttcggggccatgtttgtaatcacgctggcttatgcaggtcaagccgtacaattgggaccagagttcttcgtaatcagtgtgggaggttgtaccgttcatctgatctggcagctagtcaccctagatgttgagattcccaaaaactgcggtaggagatttgtggctaatggtgatctagggtacataatcgtaaccggtatgttagtcgattggtaccttcac

SEQ ID NO: 8 - DNA, 996 bp, Artificial Sequence
  Description of Artificial Sequence: Synthetic polynucleotide
  FungalPT_8
atgagttcttccttcagaattggattcgattcaaacccgaagactaaaggagggttattcgtggacgttgcaccgagaaaaggtatcctagcctacttaccggagagctgggttccctatgctgaattaatcagattagagaaacccattggatttgcaatcgtttacttaccctacgtaatgggtatattatacggagcgtgcatagcaccggaacctttaccggtatcagcattgctatacagagcaagggtgtttctattatggtctctagtcctacgtggtgcgggctgtgcatacgatgacatagtcgatcaagacctggacaggcaggttgacagatgtcgtacccgtcctattccgaggggtgccatcacaacgacacaaggttggttgttcacaactgggctaagcctagtgggatttttctctttatccctgttaccgtgggaatgcaccattgacgctggcatcatcaccttactaagtctgatatacccttttatgaaaagattcacaaactacacacaggtagtcttaggcctagccatcgggtttgcaatcataatggcagcccatagttttgacgtagacccacttgctaggtcaacgtatgtcccaactttgtgcttgtggttcgcagttgggttcttgatgatgttgtacgacattatatacgcacgtcaagataccaaagacgacgttaaagcaggcgtaaggtcaatggccgtgcgttatcgtcaccacgtaaaggccgtaacaagtctacttgcttttgccgtggcaggtctgcttgcgacaactggtatttacacaggaatgggcccgatgtattatttaatagcagtgggcggaacttgctcaagcctttgggctatgatcggactgatggacctggaatctccgagcaactaccccagattttgcgcgggagcctacgtgctgacatccatatccgtaataggtggttttacggcagagtacatggagaactcc

SEQ ID NO: 9 - DNA, 1002 bp, Artificial Sequence
  Description of Artificial Sequence: Synthetic polynucleotide
  FungalPT_9
atggggcaaaacttcgatgttgagactacgctactaattgctcacaaggcccccagtcgtccctgtattaaattccctcttggccacgctcctgtccatgtaagaccctatttagagctgatcagacttgagaaaccaactggcaccattttgatgttctggcccttcgcctggggcctaacgatggcggcttttagaaccggcctgccactagaacgttacggttttgacttagctaagtgttttatcggcgcgttccttcttagatccagcgcctgcactattaatgacatatttgatagggagatggacgcgggggtggaaagaactaagggaaggccgttggcctccggtagaatgtcagtgcttggcgctacggtatacctactggtgcaatacatcttggggatattattcttcttcgtaaccgtgcataacctggccttttgggtagcactattccagcttctgccactattctccatttacccattactgaaacgtgtgacacattggccccaagcgtggttgggctttgcaatgaacttcgggtttataaccggatgggtcagcgtcacggggtccctaaacaccgccgtattatctgtggcgatggcaggctgttggtgttggactatgttgtacgacaccatatacgcctgtcaagacataaaagacgatgtgaagatgggggtaagatccactgcgatcctttgggggagctggataaaaccgcttctagtactgtgcgggattggcttcgtcgctatgctatccgcggctgggtattttaatgaccagggcctgtcttacttcattgttagtgtaggaggaaccatagctcacctggtgtggcagttcatgatcgtggatttatcagtacccgcgtcttgttgggagaacttcaaccgtaatggtcaacttggttggatcgtttggggcggtctatttgtagactacctggtggccggggacttatttcctgtctacagggctctattc

SEQ ID NO: 10 - DNA, 978 bp, Artificial Sequence
  Description of Artificial Sequence: Synthetic polynucleotide
  FungalPT_10
atggcacccaccgacgctactccgctggtaaagaggaacgcggagcgtcttccgttcccgctgggtctggtgtcaccaggggtaagaccctatcttgagctaattagatttcataagcccacaggtactattcttatgttctggcccttcgcatggggattaacgcttgccgcgtatcgtacagagcttccattgaaccgttattgggtagaacttgctaagagtctgttcgccgcttttattgttcgtggttcagcgtgtacaataaatgacatattcgatagagagtttgacgctggggtcgagcgtactaaaggcaggccccttgctagtgggagggtttccgtcttcgccgcggtcgtgtacctaataatccagtatatcatagggataatggtatatgtgtcctataacgacatcgctctatacgccgccatcctgcaacttctgccactgttccttatttacccactaatgaagaggatcacgtactggccccaggcttggctgggtatctgcatgaattttgggctggtggttgcttgggctgccgtaaccggtgggttagatacacagcttttggctgtccttatggcggggacctggggttggacgatgcactacgacacgatctatgcgtgtcaagacaggagagatgatataaaagtgggtgtcaagtctacggctgtaatgctgggtgactatgtcaggcctttctgtttcgtcttatccatgatgttcataggcacattgtattacgcgggtattctgaaccatcaaactccatactacttttggattagcgtaggtggtactgcactgcatattttatatcagtatgccaccgttgaccttgattcaccagactcatgcgggttgaacttcatacgtaatggacacttggggtggataacttgggcgggcatgatggtggactatttggtaaagattgaccaactgcctgttagactacctttt

SEQ ID NO: 11 - DNA, 957 bp, Artificial Sequence
  Description of Artificial Sequence: Synthetic polynucleotide
  FungalPT_11
atgcccagtagagctaggtctttagtcgaacttacaaggatacactggtttccggtcggatcagacttcatgttttggccgttcgcatggggatcactggctgcgagttatcacgtggctcttcctatgaacgaggttataatgaacaccctattctatgcgctactgggcacattggtccactcagcgggttgcgtcataaatgatatgttagacagagatttcgacagaaaagtagagagaagtaagggccgtccgattgcttccggtgctgtgacaatgaccgaggcatcagtgctactttttgtacttgtcgccgccatcttctacatgttcagtacagctgggcctacagcattgactttagggctagttggattacccgcgtgtggcgggacttatccattgatgaaaagatggatgtattggccgtccctatatttgggtttcgctgcgagctgggcagtcccatttacctgggtcgcgattaccgggcagtttgattggggtatgattctgaatgtggccgttgcttcttgctgttggacatgtttgtatgacacaatctacgcttgccaggataagaaagatgatgagaaggctggggtgagaagtatggctgtacgtcttggagatggtattaggttggccctgagtgtattcgacgtaatattcttcgcctgcctactttgggccggttatttaaacgatcaacatctgcctttttacgtcatgtctgtaatagcccccttcctactttgtttatggcatatatggagcttcgaccataacgatcccaaggatagttgggagaaattcacggcaggaagacatggtgcggcattggtgtgcgctgggctggtggtagatcattacttgcagtcatgcgttagtagccacttgtccatacacttccatttggagttggattcttggtggtgtaggcaaaggtcatgc

SEQ ID NO: 12 - DNA, 801 bp, Artificial Sequence
  Description of Artificial Sequence: Synthetic polynucleotide
  FungalPT_12
atggcaactccacctacgaagggcatattaagttgtcttccgtcaagctgggtgccttatgcggagttaatcaggttagacaaaccacacggcatttacatgactatttacccctacgcattgggacttttatacgcgtcacaactaacctcagagtccctacctccgaacgtcgtgttgagcagattcttgaaccttgcaatatggactttcttaattcgttcagcagggtgtgcgtggaacgataacgtagatcaggactttgatagacaaactgcgaggtgtcgtgacaggcccattgccagaggcgcaattagcaccctacaagggcacgtgttcacaactgcgttactggcgcttgggttcttatccattcaaaacttccccctagagtccaagatagacggggccgccacagtcttattgacttgtatatatcctttcggaaaaaggttcacccactttgcccaggttactttgggactgacgctttctgtcgcaattatttttggaccccactcagtcggggcgaacccactttcccagggaaatttccttccgaccacttgtttggtctcatcaattatattattagttatcttttatgatgttgtgtacgcaagacaagacacggtagatgacctaaaaagtggcgtgaaaggcatggctgttttgttcaggaattggattacaacacttttgctaacacttattatagctatactaactcttttatatattacggcccgtagtcttgaccttggttgggtctttttcggtttatctgttgcaggtcccgcg

SEQ ID NO: 13 - DNA, 1002 bp, Artificial Sequence
  Description of Artificial Sequence: Synthetic polynucleotide
  FungalPT_13
atggcaccagcaacccgtacacccatccatccggaagcagccgcctacactaacccgagatatgaaagtggcccgttgtcagccatacccaagagttgggtcccttatttcgaacttatgcgttttgagcttccacacggctactatctggggtacttcccccatctggtgggaatcatgtacggggcatccgcaggtccggagagattgccggcctctcaattattgttccaggccctgctttacgttggatggacgttctgcatgaggggagccgggtgtgcgtggaacgataatatcgaccaagactttgacagaaagacagaaagatgtcgtacccgtccgatcgcccgtggcgcagtttcaacaacggccggacacatcttcgctatttccttcgtagctgccgctttcctatgcctggcaccattgccaacagagtgtcatcagcttggtgtcatcgtgaccgtacttagtataatttacccgttttgcaagagattcaccaatttcgcccaagttatacttggttttaccttagccgcgaacttcatattggctgcctacggagcgggattgccggctctggaacaaccttatactcgtcctacggcttgcgtaacactagctataacattgttagttgtcttttatgacgtagtgtacgctagacaagataccgccgacgatttgaagagcggagtcaagggaatggccgtactattcagaaaccacatagaaatcctgctggcgggtctaacctgtacaatcggtggccttttagctgtcacggggatctatgtagagaatgggccttactactttgtttttagcgtcgccggtcttaccgttgccttgcttgcaatgatcgggggaatacgttatagggtctttcactcttggaacagttatagcggatggttctacgtcattgcaataatcaaccttatgtctggatactttattgagtatctaggcaatgctcccctacttgcgcgtgca

SEQ ID NO: 14 - DNA, 561 bp, Artificial Sequence
  Description of Artificial Sequence: Synthetic polynucleotide
  FungalPT_14
atgcccagccaaacaagggcgctgttcgagtttacaaagttgcattggtttcccgtgggttgtgactttatgttttggccgttcgggtgggcattcttgagcgcaacttacaggcttgcactaccagttgacgaagtcataagaacgacttctttcttcgcccttctagcaattctggtacactctgctggttgtgtattgaatgacatgttagactgcgatcttgatagaaaggtagagagaagtcgtggcaggcccatcgcctctggggtggtcagtactacgagggcgtctatgcttttatccatacttatcacagcgttattctacttattcagcacttgtggtactaaagccttcacccttggtgtggtcgcgttccccgtatgtattgctacctacctactaatgaaacgttggacgaactggccttccttatttcttgggttcgcatccagttgggctgtacccggcacatgggtcgctatgaccgacaattatatcagggagagcctgcccccagagatcgaggtaatgtgctccaaattcctggtgttccta

SEQ ID NO: 15 - DNA, 1095 bp, Artificial Sequence
  Description of Artificial Sequence: Synthetic polynucleotide
  FungalPT_15
atggctttgacgctaagaaactctagttatcagcaggctgccttgcacacaagtacagaaaggttgaccacggccgccacacaggaagtgcctgaacctccagcatctccagaggcggtgtactctcctcccaagacagggataatatcttatttacccgcaagctgggtcccatatgctgagctgacgcgtatggataaaccagcagggacgtactacctattcttcccgtgcttgtggtccactttgatggccgctccgatggttgcgccaatggcttccccggtgtcagtaatcggcactagcttgcttttcttcagtggggccttcataatgagaagcgcagggtgcagcattaacgatctttgggatagaaagttggacccccatgttacaagaaccaaattccgtcctatagcgaggggcgcgctaacccctttccagggattggcttttaccggagcgcaactgcttgccggacttggcattttgctacaatttcccaccagttgcttattttatggtataccgtcccttctgttggtcgcatcctatccgcttgcgaagcgtatcacatactatccacaggccgtgttgggactgactttcagctggggagcgatgatgggatttcctgcgctgggaatagatcttctgtccaatagtgcggcccttaccgccgctgcgtgcctgtattcctcaaacgttgcatggacagtcctgtatgacatgatatacgcacacatggacataaaagacgatgctaaagctggtattaggtcaatcgccctaaggcatgacgccgagacaaagcaggttttaaccggtctggcggctgttcaactttctttgttgagcgcagcgggattcgcggcaggagcgggaccagcctttttcataggcagtgttggcggggccgcggtaacgctgggagtcatgattaaaagggtaaagttaaagagcgttaaagattgttggtggtggtttgtaaatggctgttggataaccggcggagttgtatctcttggtttagcagccgattataccgtaagatatatccaggatggcgaggaggatgtcaaaacacaagaacag

SEQ ID NO: 16 - DNA, 1263 bp, Artificial Sequence
  Description of Artificial Sequence: Synthetic polynucleotide
  FungalPT_16
atgcctttcataaattccgcttcaaggaacgtaatattccgtttaccttctggatgccgttcttccgtcgtaagaactgcctttaggtgtcaaagagtgcaagagaactttacgtcagccttcaataaaaacgccccgaagtgtacgcctgtctcaaatcaacaggccatttattccactttgcagagccgtcactttcatcaatctcccaataggccgttagtggcggcacctcagacaacatcacctctgtctccagaaccggagtctcagccacctgcagcctacgcagcacctagaacaggattgttatctatcttacccgctagttgggtaccatatgccgagctagtgcgtttggataagcccactgggacttactaccttttcttcccatgtcttttctctacactgctggctgcgccccttgctgtgcctatggcaagtccgttatccgtcctggggaccagtttgctattcttttccggggctttgattatgaggggtgcaggatgcactataaacgacttgtgggataggaatcttgacccccacgtgaggagaacgagattaagacctatcgctagaggcgcagtgaccccgtttaatgcactagccttcacgggagttcagttattcactggcttaggcattctattgcagtttcccacgcaatgtttgttttatggaataccgtccctacttttcgtagcctcttaccctctggccaagagggttactcattatccgcagtttgtgctgggtctaacgttttcatggggcgcaatgatggggtttcccgcattaggggtggatttgctacagaacagtgctgctttgacggcggcgggcttcctgtacgcgtccaatgttgcttggacggtcttgtacgacatgatatatgcgcatatggacataaaagatgatgcaaaggccggtattaggagtatagccctaagacacgacgcgcaaaccaagcagattttgtccggtctggccgtaacccaaatcggacttctggccgctgccggtgtcgcagcgggtgcaggccccgtgtttttcgtgggcagctgcgggggagcggctgtcaccttggcggttatgattaaaaaggttaacctcaagtccgttaaggactgttggtggtggttcgtgaatgggtgttggttgactgggggcgtcatttccgcgggtttgggagcagaatatttgatgcagtattcccagtcctcagaagttgaagccggtatgggcagggccgtg

SEQ ID NO: 17 - DNA, 987 bp, Artificial Sequence
  Description of Artificial Sequence: Synthetic polynucleotide
  FungalPT_17
atgtcccctagggtttcatcaatgccctacactaatccccgttatgaatccgggccacttagtctgatacctaaatctatcgttccgtacttcgagttgatgagattcgagttaccccacgggtactatctggggtatttcccccacctagtcggtattatgtatggggcgagcgcagggcccgaacgtctgccggctagagacctggtttttcaagcattactttacgtcggctggacttttgctatgagaggcgcgggctgcgcgtggaacgataacatcgatcaggatttcgataggaagactgagaggtgcagaacgcgtcccattgccagaggtgcagtatccacgacagcagggcacatattcgcggttgcgggtgtagctctggccttcctatgtttatctcctcttcccacagagtgccatcagctaggcgtgctagttaccgtgctttcagttatttatcctttctgtaagagatttacgaacttcgcgcaggttattctaggtatgacgctggctgcgaattttatactagctgcctacggagctgggctacctgctctggagcagccttatacacgtccgaccatgttcgcgaccctagccatcacgctgttagttgttttctatgacgtggtatatgccaggcaggatacagcagatgatcttaaaagtggcgtaaaagggatggcagtgctttttagaaaccacattgaggttttactggcggtcctgacctgcacgattggaggtcttttggccgccacaggggtttctgttggcaacggaccttactactttttgtttagcgtggcaggtttaactgtcgctttactagctatgatcggaggaataaggtacagaatcttccacacatggaacggatattcaggctggttttacgtcctagctataatcaacctgatgtcaggatacttcattgaatacctagataacgctccgattctagcgcgtggatca

SEQ ID NO: 18 - DNA, 1062 bp, Artificial Sequence
  Description of Artificial Sequence: Synthetic polynucleotide
  FungalPT_18
atgaacgctaatacttgcattcaggaagtgctagggcctaatttggttctaactaatgctactcctaagtatgccagcttaccttgtagcagatacacgacacctaaaactgggctttttgcaattatgccgcaaagctggattccatacgcagagctaatgcgtctggaccgtcctgcaggatactgggccttctactggcactttgctattggcttaacgcttgcggcgagcatctcaagcccaacaccttcccctttaaccttagtgagcagattcttatttttcgccgtgtgggtggttgtgttgcgtggcgccgtctgcacctggaacgatacgttggaccaagattttgataggagggtctccagaacacgtaatagaccgatcccacgtggggctgttagcactgtccagagccatcttttcacactagcccagatagcggttggagcagcacttctacttcctctgcccagaggctgtatgcaccacgccgcacttatgaccgctattctattagtctaccctttaggcaagagagtaacagacttcccgcaagtcatattaggcattgccttcggtatgccgatttttctgtgtggggccgctctggatgcggacccactgcctttgtcagatcttcatagatttggtactgagacggatgacgttagacttgtagctgccctttgtttctgcattggaagcattctttggacggtcattttcgatacagtgtacgcgcatcaggacgctaaagatgatgtgaaggctggggtgagaagtcttgctgttagattaggcgatagaacgaaacaggtcttgagcgtcctagcggctacgcaggtgatcttcttacttgccgcgggagtggcgtgcaaattcagtacaatatactttgcagcgtcctgcgtgggaactgcgatttcccttgcagcaatgctgtggttcgtggatctgcgtcacagcgcgtcttgcgcctggtggttttgtcccggcagtcacttggtcggggcgtccattgtagcaggtctgctaggcgaatactgttttaactca

SEQ ID NO: 19 - DNA, 783 bp, Artificial Sequence
  Description of Artificial Sequence: Synthetic polynucleotide
  FungalPT_19
atgccatcaagggcgcgttcattgtttgagcttacccgtctgcattggttccctgtcggcagcgatttgatattttggccctttgggtgggggttcttgtctgcagcatacagagttggcctgcctatgaacgaagtggttaaagacttcttattctacgccttccttgggactttggtccattcagctgggtgtgtgataaacgatatgctggatagagacttcgactgtaaggtggagagaagtaaagggagaccgattgcctctggcgcagtatctaggagtgaggcaagcgtactattagtcgttctagttgcggccatctactatatgttttcaaccgctggaacggctgcatttatcctgggcgtagtaggtttacccgtttgcggaggcgcttatcctctgatgaagcgttggatttattggccgtcattgtttctaggatttgcgtgttcatgggccgtccccttcacttgggtagcgacgactgggcagtttaactggtatataattttaacgatcgccattgcctcctgttgctggacatgcctgtatgataccatctacgcttgtcaggatcgtaaagatgacgaaatggcgggcgtcaaaagcatggcggtctccttgggagagggaataagaccggccttgtctcttttcgacttgacattctttggttgtttgtcagtcggatgggttcttgaaagaccagctccacctgtattatgcgataaatgccattgcgctgtgagacccctaagtttggcccatatggtactt

SEQ ID NO: 20 - DNA, 999 bp, Artificial Sequence
  Description of Artificial Sequence: Synthetic polynucleotide
  FungalPT_20
atggtgaataaaactgaattatcctcattaagtgaagagggaggctacacgcccccgcaaagaggtcttcttagtttactgccctcctcttgggtgccctacgcagaactaattaggattgacaaaccccacggaatttacttggtatgggtcccacatatcgtaggcttagcctacgcttcagccattggtcctagtcccgcgccagttaggcgtctgtgcacacgtgccctgaggctaatggtatgggctgccctgtgccgttcagccgggtgcgtatggaacgatacagtggaccaggactttgatagaaagaccgttagatgccgtaataggccagtggcccgtggggcggtaacaacgagccaggcccatatatttgcagcagtcctattttcactggcgtttcttagtctaagaggcatatcttcaaacgccatgagtgtggcgggtatagtggctgtactgtccctagtttatcccttctgcaaaaggttcacttcatttcctcaagttgtcctaggctcaagtttagggcttactgtcgtcctatctgcgtggtcattagacgtggatatgttagaggggcgtaaccgtatccctactatatgccttatgttggtcatagtcttgttaatagtcttttatgatgtcgtttacgcaacgcaagataccgcggatgatgtgaaggccggggtcagaggtatggctgtgcttttccgtaaccacctgcttgtactattatgtacacttgtttgcggaattgccggtgtcctgagtaccctgggaatccttgtcaacatgggtcctcaatatttcgttttctccgttgctggactggtcttgggtctaatggtcgttgttgggcttatctacctgccgtttttgtccagatggaggcgtctgtctggctgggttttcggattcgcctttgcgagcttcattggaggctttagttcagaacactacaggaggttatccctggcggcacaaagaggg

SEQ ID NO: 21 - DNA, 912 bp, Artificial Sequence
  Description of Artificial Sequence: Synthetic polynucleotide
  FungalPT_21
atgcgtgctccacccacccaaagcgtagctcagtcttggtggaggccctattgggaacttgcccgtatgcacaagtttccaacgggatctatgctagtcttttggccctgtgtgtggggttacctaatgtcagcaggtagtaatatcccaccgtggcacaggctacccgcgttgtttgcaatgtttctagtaggctccactatccttcactctgccgcatgtactattaatgatatatgcgaccgtgattttgaccgtcaggtagagaggaccaaaaaccgtcccttggctgctgggactattagcgtgctgggtgccactatatttctaatactacaggtcgccgtatttttctatatcctttcacgtgttaatagtacggccttcttgtgtggtacctttggcgtgtttcctttgcatgccttttatcctttgatgaagagaattacttactggcctcaggcttggctgggccttgcaatgaactggggtctacctacggcttggctgatagtggctcctggtgacatcaagtctgttccaatgtatacattaacattcggcactttctgctggaccatcgtgtatgacacaatctacgcttgtcaggataggcgtgatgatgtgaaagcgggtgtacgttcaacggctcttctgtttgcagattgggtaaaaccaattctaaccgttttcgccacggttttcgtagcaactctgacttacgcggggatgtctaccgggcgtggatggacgtattttgccctaagtgtcgggggttgtgcggcgcatcttgtatggcaactacttaccctagatgtggactcacccgaagattgctggtcaaaatttaactcaaacggatatctgggttatatagtgacaatagggttattggttgactcattaagagtg

SEQ ID NO: 22 - DNA, 996 bp, Artificial Sequence
  Description of Artificial Sequence: Synthetic polynucleotide
  FungalPT_22
atggcaccgtcatcagaaagggcaccgttggttcgtagaaacgcaagaccagcggagcccgagaagctacccttcccccttggtcttgtaagtccgggtgtgagaccttatttagagttaattcgtttccacaaaccaaccggtactatcttgatgttttggccgtttgcttggggtcttacaatggccgcatatcatgtagatctaccgctgaaccgttattggatcgaactggcaaagagcctattcgcggcatttatagtgcgtgggtcagcgtgtactatcaacgatatatttgacaggaatttcgatgcgggagtagaacgtacaaaaggtcgtcctctggcttccgggcgtgttagtgtgtttgccgccgttgtataccttatactacagtacatagcaggacttgtagtttatgtatcatataacgacattgctctgtatgccgctgtcctacagttacttccattattccttgtgtaccccttaatgaaaaggataacttattggccgcaggcgtggttaggcatctgcatgaacttcggcatcgttatcgcatgggctgccgtcacaggttcattagcgacggagcttttaacggtactgatggtcggaacgtggggatggactatgcattatgacactatttacgcttgccaagacagaagggatgacatcaaagtcggcgtcaagtctaccgcagttatgctgggagactatgtaagaccattctgttttgccctatctgtgatgttcatcgctacactatattacgccggcatattaaacaaccaaactccgtattacttctatatttcagtaggcggaactgcgctgcacattctttggcagtatgctactgtagatcttgattcaccggattcctgtggactaaattttattaggaacggccacatgggatggataacgtgggcagggctgatgatcgactatctagttaagatagaccagttaccgtttagaatgccattc

SEQ ID NO: 23 - DNA, 984 bp, Artificial Sequence
  Description of Artificial Sequence: Synthetic polynucleotide
  FungalPT_23
atggctacatcttccgaaagatcacccttgattcgttcccacgtccctgagaagttaccgttccccctgggactcgtgagcccaggcgtgagaccgtacttagagttgataagattccataaacccaccggaaccatcctgatgttttggccttttgcttggggcttgactatggccgcctatagaatgagcctggatttgacaaccttttggaccgagatgttcaagttccttatagcagcgtttattgtaagggggagtgcctgcacgatcaatgacattttcgatagagactttgacgcgggcgtggagagaacgaaaggtagacccttggcatccggtcgtgtgagcgtgtccgctgcagtcatctacttaatactgcagtatatcgcgggtgtcctgctatatatgccttacaagggagtagccttctgggccgcgataacacaattgttgcctttgtttataatctatcctctaatgaagagaattacgtactggcctcaggcgtggctaggaatcgccatgaacttcgggcttgtaatttcatgggtagccatctctaacaaggttgacgtgcaacttctaacattactgatggtcggcagctgggggtggacgatgcattacgacactatttacgcttgccaggataggaaagatgacgtgaaggtaggggtcaaatctactgctgtcatgctgggaaactttgtgagaccgttcactttcagctgtgctgtcttattcgtgagcacattcgcctacgcaggcattctgaacgaacaaacaccttatttcttttatgtcactattggcgggacctcactgcaattgatctggcagtatgtcactgttgaccttgatagcccggattcatgtggtcttacattcataaggaatgggcacatggggtgggtcacatgggcagggttaatgctagattatttggttaaaattgacaaggtgccttttgccctgcccttc

SEQ ID NO: 24 - DNA, 1002 bp, Artificial Sequence
  Description of Artificial Sequence: Synthetic polynucleotide
  FungalPT_24
atgataaacatcgctactaggcgtgccagaggcgcatcatcacaggaaagtaaggactacttgtctaaacaatacggcggcgtccattctgaagggtgggttaaccgtttacccagctcgtggatcgcttatgtgcaactgagccgtttatctccacccgctgcgttctttctaatccttttcccacacctattcggggtcattctagcggcgaacaccctaaaagttccggccaccgaggtagcgagggcgtgtttgttactttttggtggatcgttcttctgtagtaatgccagtcacgcctggaatgatctagttgacgctccaatcgacaaggctatcgcgcgtaccaagacaaggcccatcccgaggggcgctatcacaccactagctgcatttatatttgcggtatcacaagctaccggtgccctatcattcctttattttcttccagctgatactgcaaaggtggccacccctactattatcggcaccatatactatcctttcgcaaaacgtcatacgaatttacctcaactggtccttgggttctgtttgtcatggggtataatggtggggagtagcgcagttggggtgacgaagccgtggacagatccgtcaacggtattcttgctagtcgcctctatattatgggtcatattgttcgatacgatctatgcacatcaggacttggcagatgatgtgaaaatgggagttaagagcatagcggtgttgttcagacatcacgctaaggcgctactatgggcactgtttcttgggatgattgctagtctgttggcgtcaggctaccacgggcaacttggcatcctttattacgcggttacagtcgtcggctgtatcctgtccgtaggaactatggtcgttaaggttgatctgaaaagtccagccagctgttggctttggttctctcagggcttttggcttactgggctggctatctttggtggcttgtttgctgattactgtgggaacggcggaagg

SEQ ID NO: 25 - DNA, 1074 bp, Artificial Sequence
  Description of Artificial Sequence: Synthetic polynucleotide
  FungalPT_25
atgcacccgacgatgaaagcaaacacctccatacaagaagtgatggggccgaacttggttcttgctaacacgacccccgagtgcgatagcttacccagctccagatatacgaccccaaaatcagggttatttgctatcatgccccaaagttggataccttatgccgaactaatgagactggacaggcctgcgggatattgggcgttctattggcatttcgccatcgggcttgctcttgcggcatctatgagttcacctatacccagtccccttaccctaattagtctttttctatttttcgcggtctgggttatcgttttaaggggcgcggtatgttcctggaacgacaccctagatcagagtttcgatagaaatgtcagcaggacgcgtaatagaccgataccgcgtggcgcagtttctactgtgcaggggcatctatttacgttagctcagatcgctttaggaacagcaatgcttttacctcttccccgtggctgtatgtgccacgcggctcttatgacagcgatccttttagtttacccactgggtaagagagtcactgactttccccaggttatacttggcatagcatttggtatgccaatttttctatgtggtgcagccctagacgccgactcactgccactttccgacctttatagactaggcacggaaacggatgtgctgaggttagtcgctgccctttgtttttacatagcgagcatattatggactataatcttcgatacgatctacgcccatcaagacgcaagggatgatgctaaggtgggtgttagaagccttgctgttagacttggtgacagaaccaaacaagccctgtcagtcttagcggccacccaggttatgttactacttgccgcaggggttgcctgtaatttcagtgcgatatatttcgctggaagctgcgtaggtacagcgattagccttgcggcgctactatggttcgtagaccttaggcatagtgcgagctgcgcttggtggttttgtcccggttctcatttagttggtgccagcattatcgtcggcttgctgggggagtattgcgtgaatagt

SEQ ID NO: 26 - DNA, 1002 bp, Artificial Sequence
  Description of Artificial Sequence: Synthetic polynucleotide
  FungalPT_26
atggcaagagcaagggacaggactgcctccgatcgtgctccccttgttcgtgaagcagtgcagtacacggcgccgaccaaaggcatactatctaaggtccctgcttcctgggtaccatacggggaattgattcgtatacatcagccgcacggcatatacctgtcctatttccctcatctggtcggccttatgtatgcctcagccgtcagagatgttgtggtagctcctcccacgttgggaagatgcgcggtagtgcttttggtatggacggtgttctggagatcaactggatgcgcctggaatgacaatatcgaccaggagtttgaccgtaagaccactagatgccgtaacagacctatcgcacgtggcgcagtttccacgaccaatgggcatgtgtttgcgttagtattgtctctgattgctttcggctctttgagactattaccgcccgaatgtaccttcgtaggtctggctagtttggcgctgggtctgatatacccttttgggaaaaggttcacaaattacccccaagtaattctgggttccactctaggctctacagtcgctttgagtgcttatagtgtcggacttccggcattgagcccacctcatttgggaccgacattatgtttgtcagccacggttacacttctagttgtattctatgatgtagtatatgcaaggcaggatacggcagatgatctgaagtctggggtcaaaggtatggctgttcgttttaggaaccacattggcggacttcttgcagtgctggtagtgagtattacaggcttgttgaccactgccgggattatgatcggggcgaggcagagctattacttattcagtgtggcaggcctagcctccggcttggtttcactggcggcaagcactagatgggatttactgcacggctgggccgcaagctcaggctggtgctacgccctggcaatagcatcactggtgggcgggcttgcttctgagtatgtactttaccgtttaaat

SEQ ID NO: 27 - DNA, 948 bp, Artificial Sequence
  Description of Artificial Sequence: Synthetic polynucleotide
  FungalPT_27
atgcctacgagaggcgactatcagccgccaaaggacgggatactaagcaaacttcccgagtcagcggttccctatggggaactattaaggatacacagaccattaggatattacttgaacataagtccgtacgttgtgggcgtcgcgtatacggcggcgatttctcccgttactctgccgtccacgtttttgctaggccgtcttgtcattctatccctttggggtttctgtattaggtctgctgggtgtgcgtggaacgatctgattgacatggatatagatagacaggtcagtagaacaaaactgagaccgcttccaagaggggctgtctcacccagcggggcggccttattggctgcgttcatgttcggatgcggcggttcccttcttttactattgccaagccaatgcgcctttgaggccgcaatcgtagtcttctttgccctactttatccatttggaaagaggtttagtgaccatccacaattgatattaacgaacatcgcttgggctataccaatggctatgagcagtctggatatgtcaccactggattttccgatccctaccttggcgatgagcttctctattgcctcagtcatcgtcatgatcgacatagtttatgcttgtcaagacgcggaggaggacaagaaagttggtgctagatcaatggccgttcgttatatggaaattacagaccaaattgcgtacggattattcttcagcggcactttgtctttgttggtgggaggcatcctcagaggactgggttttcctttcctgatcttttccgttgggggtcactttttggggtttctgaggtttttgagggcatcactaggtaggggtgcgagaagtgcgctggttgaaagtcaggcgaagagcagttgcctactggctactatgctgctggtgttcgggttgtgctttgaatactgcgtgaggtta

SEQ ID NO: 28 - DNA, 993 bp, Artificial Sequence
  Description of Artificial Sequence: Synthetic polynucleotide
  FungalPT_28
atgtccccaagccaagagtatgagcccttgatgaaacacgattctgtagtccccaagccgcaaagactggccttccccttaggccttgttccagaagcggtaagaccatacttggaactaattaggttccacaggccaattgggagcattttaatgtgttggcctttcgtatggggactgacaatggctgcataccatacagaattgccgcttcataggtattggccggaattggctaggtccgtcttcgccgggttcattgtcagatccagtgcatgcacaatcaatgatatagcggatcgtgagtacgacgcaggggtagagcgtaccaaaaatagaccgttagcgagtggcaggatttctgttttcgcagcttatgtatatttagtagcacagtatattgtaggcatcctgttgtatttatcatacaacgatttagcattctacactgcccttctgcagttgcttccattattcattgtttatccctttatgaaaagagttacatactggccgcaggcatggcttggcatttgtatgaacttcggagtcatcgtagcgtgggcgagtataacaggtgcgctggattggaaactactgggtgctttaatggtggggttttggggttggactatgcattacgatactatctatgcatgtcaagacagaaaggatgacgtaaaggtcggcgttaaaagtacagccgtgatgttaggcgaccacgtcagacccttcacggcattatgtgcgacactattcgttgcaatgctggccgtagggggtgtattgaaccaacaaacgccggtctactttgtcgtatccgtaggtgggaccgctctacagttaatttggcaatatgctaaggtggatctggattcccccgactcttgtggattaaccttcatacgtaacggagacatgggctggataacctgggcaggtttaatgttagattatctggtgaaaatcgatgccttaccgtttcttcgtgca

SEQ ID NO: 29 - DNA, 1035 bp, Artificial Sequence
  Description of Artificial Sequence: Synthetic polynucleotide
  FungalPT_29
atgcgtcttttcaatacaccttccacggagagcctgttaccgacggtatacgagaagaagcacgttcccgcgcctgcagcaactgttttgaagtttccattgagtatttcccctgaactacttcacccttacatggagctgattaggcttgagaaggtcacgacaggaacgaagttaatgttctggccttacgcttgggggttgactatggctgtttactcttctaaccccactatgccgctatcacagtattcttgccaattacttcaatgtcttgttgccgcctttgtcatgaggtccagtgcgtgcacgataaacgatattttcgacaggaagatggatgcttccgtggaaaggtgtaaaacaaggcccctagccagcggtaggatctccgttcttgccgctagtatatacctggcaatccaatacttgctgggactggccttcttttattttactttggaaggactagctctatacgtggcggtattccaacttgttccactattcgcgatttatcctttattgaagagagtgacttactggccgcaagcatggttgggctttgccatgaattttgggtttatttcagcgtgggtctcaatcgcagactcttttgattactacattctaggttgtgcactggtggggtgttggtgctggaccatgctttatgacactatatacgcttgccaggatatagcggacgacttgaaagctggtgttcactctactgctattctttttgggacttggattagaccgcttcttataggctgtgcttgcgtgttcgttagtgggctttacgccgtagggagactaaacggacaggggatgggtttctttatcgtttctgttggcgggacgactctgcatctagtatggcagttttctacggtcagattagatttcccacaaagttgctggaccaacttcaacaggaacggggagctgggatggattgtttggggagggttaatgatagactacctggtagtttctggttcattaacaccactgtttcacttgttatct

SEQ ID NO: 30 - DNA, 921 bp, Artificial Sequence
  Description of Artificial Sequence: Synthetic polynucleotide
  FungalPT_30
atgccaagccagactagggcattatttgagttaactcgtttacattggttccctgtgggttgcgacttcatgttctggcccttcggttgggcctttttatctgttgcctacaggttggcattgcccgtcaatgaggtgattaagacgacactattctttgccctactgggtattcttgtccattccgctggttgcgtccttaacgatatgctagactgtgatttggatagaaaaatcgagaggtctcgtggcaggcccatagccagtggagtagtaagtcgtacaagggcctctatgttattggcagcattgatcgctccgttgttttatcttttctcaacgtgcgggaccaaagcgtttaccttgggtgtagttgcgttccccgtgtgcatagtgacgtaccccttgatgaagcgttggatgaattggccttccctgtttcttgggtttgcgacttcctgggcagttcctgggacgtgggttactatgaccgaccactacaactgggggatgatccttaatatagctatcgcctcttgttgctggacgtgtatctatgacacaatttatgcctgccaggacattaagtatgacgagaaggctggcgtcaagtctatgcctgtgcacttaggaaaggccatcaggccggtcctgaccctatttgatgcaacgtttttcgtgtgtttactttgggcgggttatttgaatgaccagaggctgccattctacatgatgagcgttttaacacctttcttattatgtctttggcatatatggtcatttgatcacaatgatcctggagattgctggaagaaatttaccgtcaggcttgcagcgatagcaatataccacaacttcgacatgcacggaacccccggaagaagtccgcgtaggggcgacggactgcgttggattgactgc

SEQ ID NO: 31 - DNA, 876 bp, Artificial Sequence
  Description of Artificial Sequence: Synthetic polynucleotide
  FungalPT_31
atggatgtagccggtaaattaattcccgagactaacatgctggatgactatacacacaagcgttttagggcaatttgggaaatggggagattacacacaagagaagcgtggctgtctgtgattccggctgtctggggagccagcatcggcgcacgtgctggttggaccgacggatggtctttcgcctgggtcctatttggtatttgggcttccgccactgtgagtcatgctgctttttgtacatggaagcaagtagagcgttgtaaaggacgtccgctaccgagcggactaatcagtgttaaagaggcgacctttttcttcctatgttggatactgttaacactgggaacgacttggtacacactggggccccaagccacgttatgcactacccccgcatggctgcttggcttaatttacccgtttatgaaacgtgttatgccatttccccagttagtggtggggttgagtgttgcatccggggtcatgccaggctacgtctcagtcagaggcatactggagtttaatggtagcgtattggctctgtttggagccactgcctgctggatcatttttctggacacggcctacgcctccctggccgtcttcttggggaaaagggttcgtatgtttctggcactagcagctgttattaccattgcattcttttccacggcagccctactgtccaacttatcactgtttacgtggattttcggcgtgggagtgtgggcggccagcatgattcgttccattttcctgctagacttgaatgtttgtgcaagcggtggacgtgtgttcaagtcaaacattgagccggggttctacctgaccgtagtgacattagtcgaaggttatttgcaagcatgtttcagt

SEQ ID NO: 32 - DNA, 1152 bp, Artificial Sequence
  Description of Artificial Sequence: Synthetic polynucleotide
  FungalPT_32
atgctgccaccccctgcgcttcgtagtcatgagggtatcgcaggaaggctattagtgcacaggcagcgtgcagtagctttccaccagacactgagaaagttacagccatccttggatacggcagcccccgataaaagcgccaacgatgaacgtttagctgagtacgtaccagcccaaactgggatcttatcagtcgtgcccaagtcctgggttccctacggggaactgattaggattgacaaacctgcgggaacatattatctgttctttccgtgcctgtttagcaccttattggcggcccctatggctgagccaatggcatcatttagctcagtagccgcaacgagtgcgctgtttttcagtggcgctttaataatgaggggcgcgggctgcactataaatgatctatgggatagaaacttggacccccaagttaggagaaccaggttacgtcctattgctagaggcgcgatcacaccattccagggagtagtctttactggtttccaattacttgcgggtctggcggtgcttgtccaattcccgttaccctgcttggcgtacggaataccctccctggctttggtcaccacttatccgttagctaagcgtgtgacttactatccacaagccgttctaggattagcgtttagttggggtgctataatgggattcccggcgcttgggatagatctgctttcaaacagttcagcacttatcgccgcggcatgtctgtacacttccaacattgcgtgggtcgtgctttacgatatgatttatgcacacatggacattaaggatgatgccaacgccggtattaagagtattgctctgaggcatgagaatcagacgaagcaagtccttaccggtctagcgattgcacaagtggcgctattgggttctgctggggtcgcagccggggccggacctatatttttcctgggcagctgcggtggtgccctagtaacacttggtatcatgataaaacgtgtcaaccttaaatctgtcagggactgttggtggtggtttgttaacggttgttggatcaccgggggcgtcataagtattgggatggcagccgactatgttgcaagaagccttaaccagccagaattagagtcagcagccgaagaagatgcgcgtctgcacgcg

SEQ ID NO: 33 - DNA, 900 bp, Artificial Sequence
  Description of Artificial Sequence: Synthetic polynucleotide
  FungalPT_33
atgccgagcagggctagggctcttttcgagttgaccaggttacactggttcccagtagggtgcgacttcatgttttggccatttgggtgggcctttttaagcgcagcgtacaggttgagcctacccgtgaatgaagtcgtaaagaccacgttattctttgccctgctaggaacgttggttcattctgcggggtgcgttatgaacgacatgctagatcgtgacttagatcgtaaagtagagaggtctcagggtaggccaattgcctctggggtcgtaacaagaatagaggcgtctgtattactggctgttctagtcgcggcgctattttacctattttcaacttgcggaataaaggcattcactctgggagttgtagcgttgccggtttgcattacgacctatccattaatgaaacgttggatgaactggccttcattgtttttaggatttgcttcaagttgggcagtgcccggtacgtgggtggcgacaacggatcagtacgattggggcattatactgaacatagcaatcgcgagttgttgttggaactgcatatatgatacgatctatgcctgtcaagatgagaaagatgatgaaaaggccggagttaggtctatggcagtgcatttgggtaaggcaatacgtccggtcctaacattattcgacacaacgtttttcgtctgtctgttgtgggcggggtatctgaatgaccagcgtgtgcccttttatatgatgagtgcccttgcaccgttcctgctgtgcctgtggcatatctggagctttgatagaaatgatcctcaggattgttggaaaaagttcacagcgggcaggtacggtggagcaatggtctgtgttggtctgattgcagatcatcactttaaactatcctctccagcgggc

SEQ ID NO: 34 - DNA, 894 bp, Artificial Sequence
  Description of Artificial Sequence: Synthetic polynucleotide
  FungalPT_34
atgtctatcatacagccgtacctggacttaatgcgtgtggggaaaccaactgggacatggttaatcttttggcctttcgcctggggcctgaccctagctgcgaggaccgtaggcacggatctatccacatattcccgtgacctcttttactgcttcgcgggggcattcgtactaagaagctgtgtatgtactctaaatgacatctgtgacgtcgatttcgataggaaggtagagcgttgtaagactcgtcccctgcccagtggtagggtaagcattccctctgctgtggtctttttcatggttcaattaggcatgtgcgttgcggcacttggacgtatgaaccaagctgccaccttgctgggccttataggcctttttccgcttcactgcacatatccgctttttaagcgttggacttattggccgcaggcgtggttgggcctggcgatgaatttcggtctgcctgttgcctgggcggcatacacaggggaggtcaatgtgccgctaatgtcatcaatgcttctaggggcttggtgttggacaatggtgtacgataccatctatgcttgtcaagacatgaaggacgataaggctgccggagtccgttccaccgcgttggttctaggcgactatattcgtcctgcgatgacctttttaagtggtctgttcatagcgtgtctggctgcggcaggcatcctggtaaatgccggcccactttattacgcaataggcgtggctggtgctgccttacacatcacgtggcaactagctactgtagacttagaaaagccaagttcatgttggaatatgttcgcatccaacgctaagttaggtggaatcgtttgggcaggccttgctgcggattacgtgcagagtatatggccggtagcggtc

SEQ ID NO: 35 - DNA, 999 bp, Artificial Sequence
  Description of Artificial Sequence: Synthetic polynucleotide
  FungalPT_35
atggcaccacgtagatcaaatgccgcaccgggcgcaaagcccagtggggattatgtaccgcctacgaggggtattctatccaaactaccggcttcctgggtgccctatgcagagctgatcaggctagaacaacctcacgggttatacatgacgttctttccacaaattatcggtctaatgttcgcgtgttccgcgagaccagacgctgtacctggatctctgttagcgcagagacttggactattgttcgtctggactttctttataaggtctgctggttgtgcgtggaatgacaatacagaccaagattttgacagactgacagagagatgtcgtaacagaccaatcgctaggggcgcggtgagcactgcacaaggtcatatctacacccttgtgcttacattactagccttcatgaccattcgtcccttaccactagagtctactttgtgtgggattgtaacaatcgtgctgaccaccatttaccccttcggcaaaagatttactaactttgcacaggtgatattgggaagcacattggcatctacgatccctctgagcgcgtactctgtagggttgccagccttatctggcgagtacattgtcccgacactgtgcctgacagctactatactgctcctagttgtgttctacgacacgatatatgcaagacaggatacagccgatgatttgaagtctggcgtgaaaggaatggcggtcctgttccgtaaccacatcgaaagtttgctggcatttttggcgttgagcattaccggccttcttgcaactgccggtacgcttttgaacatgggcacatactttttcgcttttagtgtagttgggcttgccacaggtctattcgttatgatcgcgctaattagatggcacgtcttgcctagcttcgctaagtacgctgggtggttctatgcttttgcaattgcaaacctgctcgggggctgcattgtagagtacttggggagggcccctgcactttttgca

SEQ ID NO: 36 - DNA, 876 bp, Artificial Sequence
  Description of Artificial Sequence: Synthetic polynucleotide
  FungalPT_36
atgatggggaccgttatgcagggccagtggagagattattgcagacttatgcgtatagataaaccaatcggctcattgttactgatgtggcccaccctatgggcactttggctggcttctggagggatgccccctcttaaaatactgatcgtgttcgtccttggcgtgttctttatgagagcagccggctgtgtgataaacgactacgcagaccgtaaggtagacggccatgttaagaggactgcgggtagaccgttgccaagcggtgccatcaccagtgctcaggccagaatgctttttgctgcactgatattgctgagtttctgccttgtacttttgcttaacggcaagacaatacttttaagtctaggtggattggctcttgcgtggatataccccttcatgaagcgtgtctctaacttacctcaagtcgttttaggcgcggctttcgggtgggctatcccgatggcgtacatggcggtgtctgaggccgttccgttgtcatgctggcttttgtttctagcaaatatatgttggacagtcgcttatgatacacagtatgcgatggtggacagagatgatgatttaaggataggtgttaaatcaacagcgattctttttggcaggtacgacaacctgatcaacggccttctgcaattagcaaccctagtgttaatggcgactgtcggtcacttgaatcagttgggtgcgcccttctactggagtttgctgctggcagcttgcctttttgtacaccaacagaagataaccgccaagaggcagagagaacaatgtttccaggctttcagaaacaataactacgtaggcatggtaatgtttatcggtatattgctaagctactctatggccggagga

SEQ ID NO: 37 - DNA, 984 bp, Artificial Sequence
  Description of Artificial Sequence: Synthetic polynucleotide
  FungalPT_37
atggccagtagatcaagtagaggagtgcgtttgggcgccgattatgcacctcctactcaaggtatactgtctaagctgcctgccagttgggttccctatgcagaattaatacgtcttaaccagcctcatggcttatatatgatatactttccgcatatcgtaggacttatgtacgcttgtagcgcccgtcccacggcagtaccaggtagcatgctcgcgcataggctggttttgttcgcggtgtggacgtttttaatgcgtggcgctggctgcgcgtggaatgatattgtagaccaggatttcgacagaaagactgaaagatgcagaaacaggcccgttgcaaggggtgcgattacaactataaacgctcaattatataccctagctttaactctactagcctttgtgtccttggctttcctaccagcagagtgtacgctttgcgggattttctcaacaatcctaagtaccatctacccattcgggaagcgttttactaattttgctcaggtaatcttgggatctgctttagcctctacaatagccctttctgcttacgctgtagaattaccagccctatctccgacgtacgccattccaaccatgtgtttaaccgcaacaatcttgcttctagttgtgttttacgacactatatacgcacgtcaggatacggcagacgatctgaaaagtggcgtaaaagggatggctgtattatttaggaatcatatagagaagttgctggcagtattgacctgtacgatcgtcggtttgttggcgaccgctggaacactacttgacatggggccatactttttcactttttctgtgttcggcttggcaactgggttactaattatgatcgcgcttatccgttggcacctgtttccgagttttgctaaatactctggttggttctacgcgcttgccatagttaacctattaggaggttgtgttggagaataccttcaaaaagccccagcttta

SEQ ID NO: 38 - DNA, 1002 bp, Artificial Sequence
  Description of Artificial Sequence: Synthetic polynucleotide
  FungalPT_38
atggcacccgctactcgtacgccaatacatcccgaggctgctgcatacactaatccgcgttatgaaacggggcctctttctctaataccgaaaccaatcgtcccctactttgagcttatgcgttttgaactgccgcacggctattatttgggatattttccacatttagtagggatcatgtacggagcctcagcgggaccagagaggctacccgctagggacttggttttccaggctctattgtacgtcggatggacttttgccatgagaggagcaggttgtgcatggaacgacaacatagaccaggacttcgatagaaagacagaaagatgcaggacgagacctatcgctagaggcgcggtctccacgactgctggtcacgtttttgcggtcgcgggggtagcgttagcattcctgtgtttaagccccctgcccaccgagtgtcaccagttaggagttttggttactgtgctatccgtcatttacccgttttgcaagaggtttacaaattttgctcaagttatactaggtatgacattagccgcgaatttcatattggccgcgtacggcgcagggttacccgcacttgaacaaccatacactaggcccacgatgtctgcgactcttgccattacgctgttggtagtcttctacgacgtagtttacgcccgtcaggacacggcggacgacttaaagagcggcgtcaaaggtatggcggtcttatttagaaaccacatagaggttttgttggctgttctaacctgcacaatcggtggtttattggctgcaacgggagtcagtgtcgggaatggaccttactattttcttttcagcgttgctgggcttacggtagccttgttagcaatgatcggaggtattaggtatagaatttttcatacttggaatggatacagtgggtggttttatgtgcttgctatcattaatctaatgagtggatattttattgagtacctggataatgcaccaattcttgcaaggggt

SEQ ID NO: 39 - DNA, 1023 bp, Artificial Sequence
  Description of Artificial Sequence: Synthetic polynucleotide
  FungalPT_39
atggacgaagttaggggttatagtaggccatctcacggcttgttccgtttcattccagatccctgggttccttatgccgaactgatgcgtcttgatagacaggccgggttttgggcgttttactggcactacttaattggtttaggcttcgcgatcaacattaggcctttcagcagagacctggacctagaggatctggtattactagcggcctacttggcgctttggacaaccgtttttagggggattacctgtacttggaatgataacctagatcaagattttgatagacaagtcgcaaggtgtcgtgtaagacctataccaaggggcgctgttaccactttacaggctcacatatttaccgcagtccaaatagctgtaggggcatgtatcttgtatcccttcggttcttccacacttatacatgccacggtggatggcgtgttcctttttatatacccattcttgaagaggtgtactaactacccgcaagtggaacttggtttcggtcttagttatgccatcttccttgtcacagcgatggtaggtaaagatccgttagctccgctattagacccatcattggacttgtccgctcgtgtaagtaaagtggtgcaggcgccattagctcaatccgcagcatacctgtacgttgctggcatcatatggactgtaatttttgataccatttacgctcatcaagattacttagatgaccttaaagcaggtgtgagagggttagcggtgagattggggaggaacggtactaagcctgcttgctatatcgcaggtgccgttcaagtgtatttccttgtcctagcaggacaactagcagggttcggggccgcatattacgccatcagttgtggtgttacggctctgctattagcgcgtatgatttgggtcgtggacctagaggatggtgatagttgcgcatgggcattcggccccggttctgggtatgtcggcacggcgatctgtgccgggctgtttgccgatttcttttcaaagaaatacggttat

SEQ ID NO: 40 - DNA, 1269 bp, Artificial Sequence
  Description of Artificial Sequence: Synthetic polynucleotide
  FungalPT_40
atgagcgttttattacccgcaccagctcagggtttattcaaattacccggaggatgtagaagcactatcctcagggcattacatagaaagcctaccgtgtgctttctagtaaccaccagccatctgactacaattaccacgccgagtagaagaagaccacaatcccaaaagaccagtagctgtgtggctataaggaatttccgtccagcgacgagttgctccagcacgattgcactgcataagaagagtatctcatttcccccgccttctaataccgactccacactacccaccccatacacgccacccgcgaatggactactatctaagttgccggcgagttgggtgccatacgctgaacttgtaaggatcgataaaccgactggtgcatattatttatattttccttgcctgtttagcaccttgcttgcggcgccccttgctcatcccatagctagtcccttgtcagtggtgggaacgtccttactattctttagtggagcccttattatgagaggtgctggctgcactataaacgacctttgggataggaatttggacccccatgtggcaagaacaaggttaaggcccattgccaggggtgcgatatctccttttagagcactgacatttacaggggcccaactgttgacgggcttagcgatcctgcttcagtttccgacccagtgtctgttctatggcatcccgtctctgttgttggtggcaacctaccccttggctaagagagtcacttactacccacagtttgttctgggattaactttcagttggggcgcaattatgggctttcccgctctgggcgtcgatttgttacaaaacacggcggcattaactacagcagggtttctttacgcaagtaacgtggcatggactgttctatacgacatgatctacgcgcacatggacattaaagacgacgccaaagcaggtattaggtcaatcgccttgcgtcacgatgcccaaaccaaacaggttttaaccggtctggccgtaacccaaataggattgctggccgctgccggtgtcgccgctggagccgggcccgttttctttgttggctcctgcggaggcgcagcggtcactctagcaataatgatcaaacgtgtaaatttaaaatccgtgaaagactgttggtggtggtttgttaacggttgtctactgaccggcggggtcataagtgccggactagcgggggactacgttgtgaagtacatacagcaggacgggggatcagagagaagagatgtt

SEQ ID NO: 41 - DNA, 1005 bp, Artificial Sequence
  Description of Artificial Sequence: Synthetic polynucleotide
  FungalPT_41
atggcatcacaaacaacgctatcagaaaagcaagctctggttcagggcaaagagaccacaaagagtgacggcctttctcagcagtacggaggacttcacccagagggctgggtagacagactaccggaatcttggattccctacattcagttatctcgtttatctcctccggcgggcttctttcttatatactttccccatacgtttggggcccttcacgcagcgtctgtccacggtttgccgatccaggacgttttacgtgtatgcctaatattactgggcgggagcttcttctgcaacaatgcaagtcatgcatggaatgatctagttgacgcacccgtagatgcccaaatagagagaacccgtatgaggcctattccgagaggcgctatctcttacagagccgcatttatattcgcatgcacacaagcgatagctgccgctgcttttcttctgtttctaccaagggacgcgagcttggccgctatccctacaatcataggaactatttactacccgtgggcaaaaaggcacacgaatcttccccagtttgtcctgggcttttgtttgacctggggcatcatggtaggcagtagtggcatgggtgtttcacagccgtggacggatgcgagcacggtgagtctattgttagcatctatattatgggtcgtggtctttgatactatctacgcccaccaagatatagtcgatgacctgaaagtaggggtcaaatctacggctatcttaatacagggtttcgctaagcccgcgttatggtcaatgtttctgtccatgattggctgcttgattgcctccggctactacggaggcatggggctaccatattacggattggtcgttggtgggtgcgtcgttagcgtaggaagtatgatcgctagagttgatcttgcagacccagcctcttgttggcgttggttttcccaaggcttttggctaaccggggccgcgattgcctccggcctgttggctgaatacctgatctta

SEQ ID NO: 42 - DNA, 999 bp, Artificial Sequence
  Description of Artificial Sequence: Synthetic polynucleotide
  FungalPT_42
atgccggccacgagaactcccattcaccccgaggctgctgcctatagaaatccacgttaccaaagcgggccgctatctgtgatacctaagtcttttgtgccctattgtgaacttatgaggcttgagttgcctcatggcaactttctaggttatttccctcatctagttggtcttctatatggtagcagcgcgtcccccgcaaggctaccggcgaatgaggttgcgttccaggccgtgctgtatataggttggacgtttttcatgagaggggcatattttgcatggaacgacgttgtggaccaagatttcgacagaaagacgacaagatgcagagtccgtcccgtagcccgtggcgctgttagcacgacaagtgccaacatttttgggtttgcgatggtggctcttgcttttgcatgtatttcccctctaccagccgagtgtcagaggcttggtttgatgaccaccgtcctgagcattatataccctttttgtaaaagggtaacgaacttcgcccaagtaatccttggaatgacactggccattaatttcattttggcggcgtatggcgctggtttgcctgcaatagaagctccttacacagttcccaccatctgtgtaacaactgctattacgctactggtcgtcttttacgatgttgtctacgccagacaggacacagcggatgatctaaaatctggagtaaagggaatggcggtgttatttcgtaactatgttgagattctgctgacatcaataactctagtaatagcagggttaatcgcgactaccggcgtgctggttgataacggtccttacttcttcgtgttcagcgtggccggtttattggcagctttgctggcgatgatcggtggtatcaggtacaggatatttcatacatggaatagctatagcgggtggttctacgccctggccatatttaatcttcttggcggctatttgatcgaatatcttgaccaagttcccatgctaaacagggca

SEQ ID NO: 43 - DNA, 1791 bp, Artificial Sequence
  Description of Artificial Sequence: Synthetic polynucleotide
  FungalPT_43
atgatttccactcccgaagccctattagccttcgtttgctgggtgccctttacttttgctataacttgggcaactcttggacctgcagttactgtgtcatttataccagtctgggtccttagtgtgatatacccatttatgaagcgtctgatgcctttcccccaagtagtattgggggctatcattggtggtgcagtattccctgggtgggttggggtaaccggagaccttgaccatcttgaccaggcattacccctgtttttcgctacggcagcatgggtcgtgtacttcgatgtcttctatgcaactcaagacctacccgatgataagaaggccggggttagatcactggcggtctggatgggacctaacgtcaagatcttactggcggggttaggcatattacaaatagcattctttgcaatgacagccctgcgtgcagatttgtcccttatcttctggattttaggtattggcgtgtgggcagtttcagtgccctggcatgtgcttagtctaaatttaaaagatcgtcactctggcggatgggtttttaaagctaatatcaaattgggactatacatgactggggtttctcttttagagttggttctactgagagtccaccacgctcctatgaagaaccatttaccacttactcgtgcttcaagcccgtcaattaccaaccaaacttttgcgatggacagaatagacgtacaccaccacttcattcctcccgcttacgtggaagcgttcaaaacgacgggtggagatccttctggctggcacctacctcagtggactccagagagcagtctatctttgatggattcacataatactaggacggctattctaagtctgactgccccgggaacttccatcctagcgcatagtcctggagcgtccgctacattggctagagagatcaatttgtacgctgcgaaagtacacaatgaaaatcctactaggtttggcttcttcgctagtttgccgcacctgacgcctgataccatcccggctgcaattgaagaggccatatatgccctggagactttgcacgctgacgggattactctgtacacaagatataccggtaccggctatcttgggcatgacgcattcgcgccactttgggaagagctaaatagacgtaaggccgtggtgttcatacatcccacgaatacggctgctgacgcaagaaacaggtctattcttgtcaacccggctcttccacaaccgattattgattacccacacgagacctgcaggacagcggtagatttgatcaccagcggtacaattagccgtaatccagatgtaaagattatattatcacacggcgggggtacgttaccgatcctggccactagagcggctcatttactttacgatgccaaactgacctctattagccccgaagatttcctagaacaagctcgtagcttttactttgatttggctctatccgggaacgatgaaaacatgcaattattggtaggtcgtaacgggttcgctaaaggagggcatgttttctatggctctgattttccgtacgctcccgtgtcaactattaacaaatacgttcgtatgatggaaggcttctctgtgcaaggggaggaggttgaaaaagcaatcgcccgtgactccgctgttaaattgttccctaggttccagatgcccgcggacttgagggtggggaaaacgattaattggggtgcgttttccgcatgcctgttattgcccgtgagtctatccgtgctgtactcagtattgcagagtagagtgcatact

SEQ ID NO: 44 - DNA, 1050 bp, Artificial Sequence
  Description of Artificial Sequence: Synthetic polynucleotide
  FungalPT_44
atggcagctgacagtagagcctctacgatgactatgaatgcaataaaagttccggaccatactaccattcatacaccgccaaaatctaccccaattccgccagcgtccgaaaccagctactacccacctactagcggactgttatctcatgtccctcccagctggattccgtatggagaattgatgcgtattaccaagaccactggaatttgggtaatctatctaccgcatttgtttggtacgctttatgtggcagcctccggtacgacgcacacatctgccacatctattttgcacacgaaccttacgttgttcatctatgcctttgtccttcgtagcgcaggatgtgcatggaacgacattcaggatgtagaatttgataggcaggtcaggagatgcagaaatagaccgatggcacgtggtgcgcttaccatgcgtcaaggctatttgttcactggagcccttacgctagtttgcggtatgattttgctggccctaccagccttgtgttgtgtagtggctgtaccttcttggggccttgcggtggcatatcccttcgcgaagagggtcaccgactttccacaggttgtacttggtgtacaggtggccatcggcgttggaatgggtatggcggcggtagacgctaatgcgctttatgaagccagatatgcccgtgaggcagtagtagccttctttatggctaatgttgtttggaccctagtttacgactttgtctacgcacaaatggatttagaggacgacgtgaaagcgggtgttagaagcatggcggtcaggttccaggatcgtccaaaagtcttgctaagcgttatggtatttgcgttaatttcactattggggcttacaggatactggcaaggattcggcatagcctattacggggttgcttgtggtgggattcttgcgtctatgttgtggatgttggtaacgatagatttaaggagccaagcggattgcagatggtggttcaccgaatgcacgaggctggttggctggtccatttctagcggactagcactggatgcattcctg

SEQ ID NO: 45 - DNA, 900 bp, Artificial Sequence
  Description of Artificial Sequence: Synthetic polynucleotide
  FungalPT_45
atgcctgctgtcagaggatacttcgagttgacgagactacataaaccttttatgggtaacactcttatgttctggccctgcgcgtgggggcttacgatagcagcaagagcgaccaccttgccgttagttatctttgcagaaaagttggtttggttcggtctaggatctatgctactacactccagcgcatgcgtccttaacgatatttgtgacgtagaatttgaccgtcaggtcgaaaggacaaaggagcgtccactgccgagcggtagggtttccatgcaaggcgctgttactttatgtgccgttctgttggccccagccctgtacatattatcccactgtgataggttgggaatcgcaatggggattgtgggggtttttccactacacgccttctatccgcttatgaaaaggtggacttggtggcctcaggcttggctaggtctggcttttaactggggcatcccggtggcttggataagtgtcacagggacgatgcctccacatgcgatatgggttctatttttcggaggagtatgttggacaattgtatacgatactatatatgcgtgtcaggatcgtgaagacgacaggcgtgtcggtataaagtctacagcactactgtttggtgaacatgtcagaagtatattggcgattatggtcactacgctattagtatgtttagtttacgcgggttacgcattgggacaaggtattggttacgcagttttgtcctgcggcgggacgttgcttcatactgcgtggcaaatagcaacctggaacgaagccgacttaaaagaccatagagcaaagttcgagtctaatggtatcctagggtgtgttatatggttggggcttctgtacgattacataagagtcttatatcctggcaccatcgtt

SEQ ID NO: 46 - DNA, 900 bp, Artificial Sequence
  Description of Artificial Sequence: Synthetic polynucleotide
  FungalPT_46
atgcctagccaaacaagggccctgttcgagcttactagattacattggtttcccgtcgggtgtgattttatgttttggcctttcgggtgggcgttcctttctgctgcatataggctggccctacctgtgaatgaagttattcgtattactttatttttcgcactattggcaatattggtgcattctgcgggctgcgtactaaatgatatgttggactgcgacttagacagaaaggtggaaaggtccaggggccgtccgatagcaagtggtgttgtgtccactaccagggcatcaatgctgctatctgtgttaattacagcactgttctatcttttctccacctgtggcaccaaagccttcactttgggagtggtggcttttcccgtttgcatcgcgacgtatccgttaatgaaaaggtggatgaactggccatccctatttcttgggtttgcgtctagttgggccgtccccggtacatgggtggccatgactgaccactacaattgggggatcatacttaatatagccatagcatcctgttgctggacgtgcatctacgatactatatatgcctgccaggacataaaggacgatgaaaaggcgggggtgaagtcaatgcctgtccatctggggaaagccattagacctgtgctgacattgttcgatgcgacctttttcgtgtgccttctatgggcagggtacctaaacgaccaaaggcttcctttctacatgatgtcagttctaaccccatttctgctgtgtttgtggcatatatggagctttgaccacaacgatcctggagactgctggaaaacgtttaccgcgggcaggcatgggggcgctatggtttgtgtcgggctaatcgtggatcaccattttaagttgctttctaatgcaggt

SEQ ID NO: 47 - DNA, 1059 bp, Artificial Sequence
  Description of Artificial Sequence: Synthetic polynucleotide
  FungalPT_47
atggcacttctgagtaggtccaccaccgccgcaagacagatcccaccgcctcctccacctcccctgcccgccgcagcaacaccctacgaaccaccgaaaaccggacttttagcccaacttcctcctagctgggtaccatacgccgagctaataagactggataaaccagcggggacatattatctgttcttaccctgtctgttctcaacacttctagcggcaccattagcggctccgatggccgcccccactacggttttggggacctcattgctattctttgccggagcccttatcatgagaggggctggctgcactattaatgatctttgggaccgtaatcttgatcctcacgtcaccagaactaggttgaggccaattgcgcgtggggccgttacaccctttcaggcattggtcttcacgggcgcccagctgtttgcaggtctagctattttgttacaatttccgttatcttgtttcttctatgccacaccatctttgttatttgtggcggcttatcccctagccaagcgtgtcacgtactatcctcaattcgtactgggtctaactttttcctggggtgcgatcgtgggtttcccggcagttggtgtagatctgctgagtaacggccctgcccttacagccgccgcgtgtatgtacgcaagcaacgtggcatggactgtcctttacgactttatttatgcacacatggacgctagagacgatgtaaaggcggggataaagagcatagcgttggcccacgaccagtcaaaacaacttcttgtcgggctggcggcggtccaaatctctttactggctgcagcgggtgttacggcgggcgcgggacccgcattcttcgtaggtagctgcggaggggcggcagtcacattaggctatatgataaagaaggtgaatttgaagtcagttaaagattgttggtggtggtttgtgaacggttgtttattaacagggggcgcgatttccgctggcctggccgtagactatggcctaaagtatacccaagaagctgataataagaagacagagttggtagagggc

SEQ ID NO: 48 - DNA, 1026 bp, Artificial Sequence
  Description of Artificial Sequence: Synthetic polynucleotide
  FungalPT_48
atgccgattctggctccgctaggcccgtcacctctaagcgaggtttttacctactccaatttaccctctcctgtagaaatggctaccggcaaggactacagacattccaaagctggcattctaagcaagttgccaccctctataaagccgtatgctgaactactaagaatccacagaccgttgggatactatttaaacatctccccctacgttgtaggtgtcgcctataccgctgctattgctccagtaagtttgccggcaacagtgctgctgaatcgtcttattattttgtccctttgggggttcctgattcgtagcgggggttgcgcttggaacgacttgatcgacatggatattgacaggcaagtgagtcgtacgaagctaagacctctaccacgtggggcaatatcacctacgtcagcggcattacttacagctataatcttcggttgtgggggtttgctgttacttttgttaccgtcacaatgcaccgtagaagctgggatcattctattcttcgctctattgtatccatttggcaaacgtttcagcgactatccacaactgatcctggttaatatcgcgtgggcaatcccaatggctatgtcttccctagaagtggaccctcttgatttcccctactccacactaagcatgtgtattttcattgcgtccgtcattgttatgatcgacgtcgtttatgcctgccaggatgcagaggaggacaagaaaataggagccagatcaatggctgtcagatacagtgatataactgatcaactggcctatggcttctttttctctggagccatctcactactgctaggaggggttttgagagggctggggctaccgttcattgttttctcagtaggcggtcatatcttcgggtttttgaggtttttaagcgtaacgcttggggaaggaacaaggtcagctagtgttgaaagcagggccaaaagctcctgtttgttggctactgtgttttgggtcctagggttcttcctagagtatcttgctcgttct

SEQ ID NO: 49 - DNA, 993 bp, Artificial Sequence
  Description of Artificial Sequence: Synthetic polynucleotide
  FungalPT_49
atggcaggaagaagtgatgaaacaatacttcttatcgctcatcgtaactcccctaaatatgttattaggttcccactagatctagcgccttctcacgttcgtccttatcttgaattgattagattagaaaagccgacggggacagtccttatgttctggcctttcgcttggggcttgactatggccgcctttgccactggcctacccctgcaactatatgggtctcacctgatcgagtgtttcatctctgcttttctactacgttcatcagcatgtactgtgaatgacatatttgatcgtgaaatagacgccggcgtcgaaagaacaaggggtcgtccgcttgcctctggcaggatatctgtattcgcagcaaccgtgtatttattcgtacaatacataattggtatttcattcttttatgtcactgtcaacgatcaagctctttgggtgggtttgttccaattgttaccattatttgccatctaccctcttttaaaaaggttcacccactggccgcaagcctggctaggattcgctatgaactttggtttcgtaactgcatgggtgagtctgacgggccgtttggatgtaaagttaatcagcatagccatgactggttgttggttttggactatgttgtacgacaccatctatgcttgtcaggacatccaggacgacataaaaatgggagtgaggtcaacagctatactatttgggtcatggataagacctcttttagtgctttgcggagtaggattcgttacgatgctagggttggctgggtacataaacgggcagggtccgtactactttgtccttagcgttggcgggaccactgcacatcttgtatggcagttcaagttggtcgatctggacgtccccgcatcctgctggcaaaattttaaaaacaatggtcatcttgggtggattgtttggtgcggcctgatggtggactatttaagttctattggattcttccaatacgtcaggagc

SEQ ID NO: 50 - DNA, 885 bp, Artificial Sequence
  Description of Artificial Sequence: Synthetic polynucleotide
  FungalPT_50
atggcgtatttcagacttatgagattacataaattccctgcgggtagtatagtagttttctggccctgcgcctggggtgttataatgagcgcctccatcaccgacatgaagccgccccaggtagcgatccagttggtcttatacttgataggctccacaataagacattcagccgcttgtatctggaacgatatctgcgaccgtgaatttgatagggaagttgagagatgcaaaacaaggccctttgtagcaggaactgttagtatgaccggcgctgtgacattactaatttcacagttagcactaggcattggattgttagtttatgcaggtcctgttgcgacaagggtcggtttgttcggcttagtatttttagacttcccgtaccctcttatgaaaagatggacttggtggccacaagcctacttgggtctagccatgacttgggggttgccagtttcttgggttagcattgtatcccatatggattggaccgtagttccagtgttattcctgggtggcgttagctggaccatccactacgacacgatttatgcctgtcaagatcgtagagatgacgtaaaagctggcgttaggagtacagcggttctttttggtgatcacgttcgtccgatattaagttgcttcgccactttcttcgtcgcgagtttggcgttagcgggcgtacagaatgctcaaggtcccctgtattttgttatgaccgtggttggaacggcgggtcatttggcatggcaactagccacaatagattttgacgtatcagccgactgttggcgtatgtttaaagccaatggcaatctaggatacatcattttatctggtatgcttgcagattacctttaccgttgtaccgatatgttaggg

SEQ ID NO: 51 - DNA, 861 bp, Artificial Sequence
  Description of Artificial Sequence: Synthetic polynucleotide
  FungalPT_51
atgccatccagagcccgtagcttatttgagctgacgagattacatttattcccagtaggttgcgactctacattttggccctttggaaaaatagacgatgagttagcatatctgacgtatgagggattgaccaataggatcgggtcttgccaccaggataggggattttcttcttctggtggttccccgtgccatagactactatatgtgttcgcctattggtttaaatccctacataaccgttgctgtttcacgcccagcctgtggcgtggagtcagcgtgaacgaagcattagacgcactgacattctcagtgccgaggtatggacagagctttggtgcatcatgggcagtcccaattgcttgggttgctaccaccgggcagttcaactggggtatgatactgaatttcagcatagcgtcatgttgctgggcgtgcttatacgatacaatttatgcttgtcaagataaaaaggacgatgaaaaggccggcgtacgtagtatggcagtgaggctaggcaatggtatcagaccagtcctttctttatttgatctaacctttttcgtcagtttattatgtgcagggtatcttaacggtcaagggctgttatactacgtaataagcgttatagctccgtttttgttatgcctgtggcatatttggtcatttgaccacaatgatcctaaagactgttgggaaaaattcactatcaggataacggatatttcaacgcaggcagttatggctagactatggaacgagaggaagtgcatagtgctttcatgggccttatcatctaaggataaaaagcaggtcacggatgaattttatgtcactacaatttcacaattggatgacaga

SEQ ID NO: 52 - DNA, 960 bp, Artificial Sequence
  Description of Artificial Sequence: Synthetic polynucleotide
  FungalPT_52
atgtctagtgcctcagtagcaagccaggagaaacaaagccttttatctggaaccgtcaatgcttccccaaaacccttgcagccctggtggcgtggatactgggagttggcgagaatgcataagtttccagcagggtctatgctagtcttctggcctacggcatggggctatgtcatggctctgcgtgataatcgtccagagccgctgcaattagcttacattatggcggtcttctttgtagcgtctactctgctacattccgctgcgtgtactataaatgatatatgcgatcgtgacttcgatgctaaggttgagcgttgcaagaacagaccattagttgcaggaacggtatctatgtttggcgcatgggtctttctattcttacaggtggcagcctttttctggatgctatcttatacgaacaaggaagcctttctttgtgggactttcggagttttccctttgcacgcattttatccacttatgaaacgttggacaaattggccacaggcatggttggggtttgctatgaattggggattacctactgcttggttaatggccgcacctaatgattggcaatttgcccctatgtgggcgtttaccataggcacagtgtcttggacgatcgtgtatgacacgatctatgcttgtcaagacaggaaggatgacgttaaggcaggtgtgcgtagtacagcagtcctgttcggcgattacgtgaaacccatcttatcatgttttgctgctgcctttattgcatctttaatctatgcgggcgtcacaactggtcaaggttggatatactacgcagtgagtgtagcaggctgcgcgggtcatcttctatggcagttaataaccctggatactgaagatccgcaggattgttggaacaagtttgacagtaacggataccttgggtacgttgtatttgctggtttacttgggggttggtacatctat

SEQ ID NO: 53 - DNA, 1017 bp, Artificial Sequence
  Description of Artificial Sequence: Synthetic polynucleotide
  FungalPT_53
atggcagcctctcgtataccgaaagctagagaccgtaccgcatcagatagagcgtccccggtccgtgacgctgcacaatacactgctccaaccaagggaattttgagcaaggtaccggctagttgggttccgtacggcgaattaatgcgcatccatcaaccgcatggtatttacatgatctacttccctcacctattgggcctaatgtatgccagtgcggtacaagacgtagtggtcgccccacagactcttggacgttgtgccgctgttctgttgatctggacagtgttttggagatccgctgggtgtgcgtggaatgataacatcgatcaagattttgatcgtaaaaccacccgttgccgtaatagaccaatagcccgtggcgctgtgtccaccgcaaacggacatatatttacgttggtacttagtctgatcgccttcgggtccttacatcttttacccagtgaatgcactctagtcggattagccagcctggcgcttgctatgatataccccttcggcaaacgttttacatattacccccaagttatcttaggctcaacgttgggaagtacagtatccctttcagcttactctgtggggcttccagctcttagcccaccgtatcttgggcctaccctgtgcttatcagcgaccgttaccctgctggtcgtgttttatgatgtggtgtacgcaagacaagacacggcggatgacctaaagtccggcgtcaaaggaatggccgtgaggtttagaaatcacatagaagggcttttagcagtgatcgtggtcagcataactggtttgctgacaatggcgggtataatgattggcgcgaggcagtcatattacctgttctcagtcgctggcttgactagcggccttgtgtccttggtcgcttcaacaaggtgggacctgttacatggatggggcgtgagcagtgggtggtgttatgccttagctatcgcttcactggtcggaggactagcgaccgaatatgtgttatataagctaaac

SEQ ID NO: 54 - DNA, 909 bp, Artificial Sequence
  Description of Artificial Sequence: Synthetic polynucleotide
  FungalPT_54
atgccgtcacgtatgagggctctatttgaattgacaaggttacactggtttccggtgggatgcgacttcatgttctggcccttcgggtgggccttcctaagtgcagcctaccgtttggctcttcctgtgaatgaagtggtaaagacgactctattcttcgctctattgggtattttagtgcattcagcagcatgcgtcatcaacgacatgttagatcgtgaccttgataggaaggttgagcgttctcaggggaggccgattgcatctggagtcgtaaccagaaccgaagcgagtattcttttagtattccttgtggcgccactgttttatctattcagcacatgtggaacaaaggcgttcacattaggcgtcatcgccttccccgtctgtataacgatgtaccccttgatgaaaagatggatgaattggccgagcctgttcttgggtttttcttcaagttgggcagtgccgggaacttgggttgccaccactgggcactataattggggtattattctaaacattgctattgcgtcctgctgctggaattgtatttatgatactatttacgcttgccaagacgaaaaagacgacaagaaagccggagttagaagcatggccgttcatttaggcaaagcgattagacctgttctaactctttttgatgttacattctcaatgtgcttactgtgggcagggtatttgaacgatcatggtttgcctttctacatcatgggggttctggtgccgtttttgctttgtctgtggcatatctggagttttgattacaaagaccctagagactgttggaagaagtttactgctggcaggttaaggcgtgatgatgggttaaggaggatcaactataggtccccgttacagactttagtgaggagaaggcttagaata

SEQ ID NO: 55 - DNA, 957 bp, Artificial Sequence
  Description of Artificial Sequence: Synthetic polynucleotide
  FungalPT_55
atgaacgtcagtattactccgtctagtcaaaggaatgtccccagaggtatatgggaacttgcaaggctacacacccgtgaggcatggttatgctggtaccccgccatatggggcgcatgtgtagctgctgggatgagagacgtgtcccttgagctgacgaccttcctaaggcttctgttcggcatatgggcaagtgtaacagccactcattgtgcgttttgtacttttaatgatatttgcgaccgtaagttagacaagcacgtcgaaagatgtaaagtgcgtcccctgccagccggaatgatcactacgtctgaggcggtagtagcatttatttgttggttaccgatcacgcttgcggttacctggggcactctagggccagcagtaactgttgggtttattccggtatgggtacttagtacgttataccccttcatgaagaggattatgccatttccccaagtcgtactaggggccataataggaggtgctgtttttccgggatgggttgggattactggtgatttaaagaatttggatgaagcgttacccttgttctttgcgacggcttcttgggttgtttatttcgatatattttacgctactcaggacagaccagatgatgagaaaatcggagtaaaatcactggctgtcttgatgggaaagaacgtccaaatcctgctggctgccttaggcgccctacaaatgttgttattcgcggtaaccgcgcttagagccgatatgagtttgatattctgggttttaggtctaggagtatggatggtctcagtcccgtggcacattctttctctggaccttaaagacaggcatagcggaggcagggtgtttagatctaacattaagttaggtctttaccttacaggcgtttcattactggaactttttgtcgtaagggtgtacgatgtcagtctggccaatttgaagatggaattacat

SEQ ID NO: 56 - DNA, 1020 bp, Artificial Sequence
  Description of Artificial Sequence: Synthetic polynucleotide
  FungalPT_56
atggccccgagcagcagcagagcgaccgctagagagtcacccgagaagaaaccgttgattggggaggcacccccatataaaccgccaacaaaaggctttctgtccatacttcctgcgagttgggttccttatgctgagctgacgagaatacaccagccacacggtatatatatgatttacttccctcacttagtaggcttagcatatgctgcaagtgtgcaacaggccgatctggcaatgcctccttccgagcttgcgtatcgtgcggcggtcatgttgggttggactgtcttctggaggagtggaatatgtgtgtggaacgacaacatagatcaagacttcgataggaagacggcgcgttgtaggaacagaccgatcgcccgtggagcgatatccacagctcaggggcacgtattcgcattagtattgaaccttattgcctttgcctggttaaggttgctgccaagagagtgtactctggtagccttagggagcaccgtgctgggcatgatctatccatttggcaagaggtttacatactatccacaagttatactgggctccacgcttggttcaacagtggcgctttccgcttactctgtcggccttccagccgtttcaccgccatacctggggacgaccgcctgtttagcagcagcggtcttattgctggtcgtattctatgacactgtttatgccaggcaagacacagcagatgacttgaagtcaggtgtgaaaggaatggctgtaaggtttcgtgaccacattgaggggctactggctgttttagctgtaagtattgccgcattgctgacgacggcgggagtgttgatggaagcacaacaatactattacgtgtttagcgtaggtgggctaacgatgggactaatttctcttgttgcgcttactcattgggatttattgccaagctgggcgggctcaagtgggtggtgttacgccctagcaatcgcaaatttaattggaggaatggcaagccaatacgtccttcgtggggcagct

SEQ ID NO: 57 - DNA, 1044 bp, Artificial Sequence
  Description of Artificial Sequence: Synthetic polynucleotide
  FungalPT_57
atggggcaatccagtagacctttggtcgaaacgttctctgctgctaccacgaccgggcccgcaccttacaagccccctgagactggtcttttatctaaacttcctgcgtcttgggtgccctacgctgaactaattcgtctggacaagcccgccgggacttattacttgtttttcccgtgtctattttctacgctgatggccgcaccaatggctatgccgatggcttctccaggctccgtgataggtacctccctgttatttttcagtggagcactgataatgagaggagctggatgcaccattaacgacttatgggacagaaacttagacccgcacgtttctcgtacacgtcttcgtcccatagcgcgtggagcaatcacaccttttcgtggtctggtgttcaccgggtgtcaattactgacaggactaggtatattacttcaattccccctaccttgtctgttttatggggtcccgtccctaatcctagtagcctcttacccactagcgaaaagggtaacgtattatcctcaggcggttttggggctaacctttagttggggtgccattatgggcttccccgcactagggattgatctaatctcccacacgacagctctgacagccgctgcttgtctatacacaagtaatattgcatggaccgtcctttatgacatgatctacgcccacatggatattaaagatgacgttaaggctgggatcagatccatagctctgagacacgatgccgaaacgaagcaagtgctaacggggttagcggcagctcagatcagcctgctggctgtcgcgggctatgcggcaggtgcagggccagctttctttattggcagctgtggaggcgcgatggtaaccttaggactaatgatcaaacgtgtagatttgaaaaatgtcaaagattgttggtggtggttcgtaaacggctgttggataacgggcggagtcgtctccctaggtttaggtgcagactatgctattaagtacgccgaagagcatgaggaaggaaatagaccaagagctgagtgc

SEQ ID NO: 58 - DNA, 900 bp, Artificial Sequence
  Description of Artificial Sequence: Synthetic polynucleotide
  FungalPT_58
atgccgtcacaagctagggccctgtttgaacttacgaggctacactggttcccggtcgggtgcgatttcatgttctggcctttcggatgggcgtttttgagtgccgcttatagactaacgttacctgtggacgaagtagttaaaacgacattattcttcgcattgctaggagtcctagtgcatagcgccggttgtgtcctgaacgacatattagattgtgatcttgataggaaggtggaaagatcacaggggcgtcctatcgcctccggtgtggtgaccaggacgaaagccagtatactgcttactgtcctagttgcggcattattctacctgttctccacatgcgggacgaaggctttcaccttaggagtaatagccttccccatctgtatcacgacttaccctctgatgaaacgttggatgaattggccgtcattatttttagggatgacactgaggttcattgaaaagtacccggtattgtactgcttcaaagcgtttctactggcgggtcccagccaagagccaatagcctcatgttgttggaactgcatctacgacacaatctatgcttgccaggataagaaagacgataagaaagcgggtgtccgtagtatggctgtccatttggggaatgccataaggcccgttcttacgttattagatgccacgttctttgtttgcttgttatgggcaggctacctaaatgatcagagactgccgttttatacgatgagtgtttttacgcctttcttcttatgcttgtggcatatatggtcattcgatcatgacgaccccggcgactgctggaaaaagttcacggcaggtagacagggcggtgctatggtgtgcattggtctgattatcgaccactacttcaagttatcctctcatgctggc

SEQ ID NO: 59 - DNA, 1008 bp, Artificial Sequence
  Description of Artificial Sequence: Synthetic polynucleotide
  FungalPT_59
atggccgcaagaagtcgtagtccccgtaggggaacctccgagaaaacgccgcttgtcgaaaaagaggccccctaccagccaccaacaaggggaatcctgtcaaaactgccagcgagctgggtcccttatgcccaactaataagattggagcagcctcacggaaactatatgatctattttccgcatataataggtctaatgtatgcgtccgcgattcgtccgaccgagttatctgtcttagggcacagagcagccatctttgcaatatggacgtttcttatgaggggtgcgggctgcgcgtggaatgataatgtggaccaggacttcgacagaaagaccgagagatgtagacatcgtccaattgcccgtggtgccatctccactacacaagggcacgtatttaccctaatacttacacttttgggatttgccgcaattcaaagtctacccatcgagtgcacatacgttggcgttgggactacagtcttatccgctatatatccatttggcaagaggttcacacatttcgctcaagtaatattaggcagtaccctagctagtacaatcgccctgtctgcctattcagtaggtctgcctgctctgtcaaaggactactttgtccctacactgtgtctatccgcaacgatcatgctactggttgtattttatgacgtggtatacgctcgtgcagacactacggacgacttgaaaagcggggtcaagggcatggcggtaaggttcagaaaccacttggagggtttattcgcgttcatcactttatcaattgccgggtctctgaccacgcttggctaccttgtaggcatggggcattggttttatctgttcagtgttggaggattgacctttgggttagtcagcatggtggccctgactcactggaacatcctaccgggttatagctccgggaggtgctatgccttcgcaatcctaaatcttcttaccggtttcatcatggaatacgcgaccaaggattacgtggtaggagtt

SEQ ID NO: 60 - DNA, 1047 bp, Artificial Sequence
  Description of Artificial Sequence: Synthetic polynucleotide
  FungalPT_60
atggcagccccaagacttagtaacattttcgctcgtgctccaaaagatgaagtcgtctttgacaaggtatcatccccctcctcccagaatgggggttccttgacgtcttcctggataacgattttacccaaaacatggataccgtatgttgaattagcgaggctgagccctcctgccgccccttttcttatttactttccccacttgttcggcactctacatgctgcaaatgtccagccgagttccattagtaatctattacgttcatgcgtgttacttctgtgggctagtctattcttctctaacgcggcccatgcgtggaatgaccttgtggacgcacccatcgacagaaaagtttcccgtaccaagaatcgtcctatagccagcgggataataagcagccgtgctgccataatttttatggtgtcacagtctctgatcgcggcgagctttctattattgtcttcagttagtaccgctatggctaccctaccgacaattctagggacgatttactacccctgggctaaattgcatactcactttccccaggtgattttagggttctgtctggcttggggtgtaatggttgggagtcgtttcgcaggtttgcgtcagccctggaatgaccaagcgggactatgtttggtattcgccagctcttgttggacaatcatctacgacaccatctacgcccatcaagatgtcgctgaagatatacatctgggagtaaaatctcttgcagtattatttggcggtcacgtaaagcctctgttatgggtggtgctgtttatgatgggcgtttcattgacgttgtacggacagttgatcgaagtgacgattggatattatgtgataacacttgggggctgcattttctctctaggctctatgatatttaatgtaagactttccgataaggcgtcatgttggaaatggtttagtaccgggttctggataacggggactagcattaccctgggcctgctgtctcactacgtgcaagtaagatccggctacagggagggattatccgagtgttgccta

SEQ ID NO: 61 - DNA, 1020 bp, Artificial Sequence
  Description of Artificial Sequence: Synthetic polynucleotide
  FungalPT_61
atggtgtcatcaaccgtccaaccagccaagaccggcgggcagagccaaggcagaggacgtgtggctacatctgattaccaaccacctactacaggggtcctgagtaagttaccggcaagctgggtaccgtatgccgagctgattagattggaacaacctcacggactgtatatgacttactttcctcacatattagggctaatgtatgcatgcagtgccaaaccaactgctgttgcaccttctgtgttggctcacagattagccgtcttctttgtttggaccttcttcttgaggagcagtggatgcgcttggaatgacatcactgaccaagagtttgaccgtcacaccgcaaggtgcaggaaccgtcccgtcgctcgtggtgcggtgacggctacgcaagggtatatttacgcattcttaattacagcgttggggttcttaactctgtacacgacccttcccttcgaatgtaccctatgtggccttgctaccactatcttagcgatgatatacccatttggaaaaaggtttacctatttcccccaagttattttgggcgcttgccaggcgtctactatcgtaacggcatcatatagcgttggactacctgcattcagtgctcattatttcattcccactctgtgcctaaccacgaccgtactgcttttgatcattttctatgacacaatatatgcgaggcaagatattgtagacgatttaaaatccggtgtcaagggcatggcggtattattcaggaaccatattgaagcactattgggaggattaacttgctccattacgttcctactggcgactgccggttcattacttaacatgggcccctacttctttgcgttctccgtcgtcgggcttgcttccgggttggttgtaatgatcgcactgattagatggcatgtacttcctgggttcgagaagtattccgggtggttctacgctgccgcgatagtcaacttgctgggaggctgtgttgcggagtacgcgagcagagtctttatgttg

SEQ ID NO: 62 - DNA, 969 bp, Artificial Sequence
  Description of Artificial Sequence: Synthetic polynucleotide
  FungalPT_62
atggcaaggacaactagcagtaataacaagttcgcggcagctatattgccattgtggcagttgtcaagattcgacaccagggagagctggctggcatgctatccagctatgtgggggcttagccttgctactaagcattacgatcttaatatcggtggtacaggcttagcggccctggtcgcctcaaattggctatgtatgacacttatacactctgctttttgcacatggaacactcatatgctgaagagtttcgtacaaccacaccacacttctactgtaagacttatagataagtgcgctgcacgtacagccaccagaccacttccatctgggagatgctcccccgcaaaagctcacacttggttttacgtccagttgttcttggcgaacaccgctatgtacaccttactaggtccggccactcatcttaccatgcttccatgcctagcattatcattcttttatccgctgagcaaaaggtatatccagtggccccagttcgttctggcaccgactgttggttggccggtatttgctgggtggctttccgcccaggcacatgcaggccttagagagaaaatggaaccatccatatgtggaccattgtttgcttcctatgctgtatggacaatttactacgatacctgctatggtcttcaagatattgcaggagataaagaaagcggggttggttcattggcgcagttccttggagttaaatatatcaaatcattccttctggggctaaacgtaattgccctgtctttccttggcttggctgcggaacgtgcaagatgctccctgcttctgtggacgttgggaattggcttttgggccttatcagtcccttttcaattcaggggacttgacccaacggtcccgggcagcggtgggaaaatctttaagtttaacataacgttaggaatgtacgtgacagtggtaatcctagcggaagcgtggattggt

SEQ ID NO: 63 - DNA, 999 bp, Artificial Sequence
  Description of Artificial Sequence: Synthetic polynucleotide
  FungalPT_63
atggcacctagacgttctcacgcagcgcctggtgcaagaccctctggtgactatgtgccgccaaccaggggcatcttgtctaagctgcctgcgagctgggtgccatacgctgagttgattcgtttagagcagccacatgggctatacatgacattctttccgcaaattatcggcctaatgtttgcgtgctccgccagacctgatgcagttccgggttctctgctggtgcagcgtcttggattgcttttcgtctggacgttcttcatccgtagcgccggttgtgcttggaacgataacacggatcaggatttcgacagattgacagaaagatgtagaaacagacccatagcgagaggagcggtctcaaccgcccaaggacatatcttcacgttggtcctgacgttgcttgcctttaccgtgatcagaccgcttcctcttgagagcacgctttgtggcatcgttacaatcgtgctaacaacaatttatccctttggtaaaagatttactaacttcgcccaggtaattttaggaagcactcttgcctctacgattcccctttccgcgtattcagtaggtctgccagccctatccggggagtatatagtcccgacgctgtgcctgacagcgactatactgttacttgtggtattttatgatacaatatatgcgcgtcaagacaccgcagatgaccttaaatcaggggttaaaggaatggcagttctttttcgtaatcacatcgagtcattattagctttcttagctctttcaataactgggttgctggcaactgcaggaacccttctaaacatggggacatacttctttgcatttagtgtagtcggactagcgaccggactttttgttatgatcgcgttgattagatggcatgtgctaccctcatttgctaagtacgcagggtggttctacgcattcgcgatagcaaatctattaggagggtgcattgtagagtaccttgggagagcgccagcactattcgcg

SEQ ID NO: 64 - DNA, 1206 bp, Artificial Sequence
  Description of Artificial Sequence: Synthetic polynucleotide
  FungalPT_64
atgccaagattgataattcccaaagggactaagtgtttgctatcacagagaccagttttaccaagcagccagagactaagttccaagtttcatagtatcagtagaggaacgacgtatgcttccacggctctgagttttccaaaacctcgtcacataatccccgtgacttcatccagcacgagtcagaggggagcccatacaatagacagcccgtctagtccagtaattcccgaaccatattcacccccaaccagtgggatcttgagtcgtgttcctaaatcctggataccttacggtgaactaatcaggatcgataagcccaccgggacctactatttattctttccatgcctgttcagtaccttaatggccgcccccttggcaaccccaatggcgactccgctttccgtgataggcacttcagctttattctttgctggggcattgataatgaggggtgcagggtgttcaatcaatgatctatgggatcgtaacctagataagcatgtgactaggactaggcacaggccactagcaaggggcgccattactccttttcgtgccctgacatatactggagttcagcttctggcaggacttgggatattattgcaatttcctaccagctgtttgttctatggcatcccgtcattgttattagtagcatcctaccccctggctaagcgtgtaacatactatccccagtttgtcctgggcttaacttttagctggggtgccgtaatgggattccccgcgttgggtgttgacctgcttgccaattcttcagcgttgactgccgccgcgctgctttatgcatccaatgtttcctggactgtcctgtatgatatgatctatgcacatatggacattaaagacgatgctaaagcgggaataaggtccattgcgcttcgtcatgatgcagaaacgaagaaggtgttaagtggtcttgccgttgtgcagattggattactgggtgcggcgggtatggcagctggggccgggccggcattcttcatagggtcttgtggaggtgctgccttaaccttgggctggatgataaagagggtaaacctgaagtccgtcaaagattgttggtggtggtttgtgaacgggtgctggattaccgggggagctatctccctaggattaggagcagactatcttatacaatacagccaagaggacgcgttggggcgtgtcgaggat

SEQ ID NO: 65 - DNA, 960 bp, Artificial Sequence
  Description of Artificial Sequence: Synthetic polynucleotide
  FungalPT_65
atgtcaagccgtccggcaaccgagaggtccgccctaagaaggaaggaagaattgtcaagacccgtcacggcaccccgtcctacgcaatggtggtggcagccatattggcaacttgcccgtatgcacaagtttccagtgggctctaatcttgtttggtggcctaccatttggggatggttgttggcgttaccggaaagaccggatgctgtcactctaacagtatacatctccctgtttatggttgctggcacgatactgcactccgccgcatgcacgataaacgacatctgcgatgtagattttgatagacaggtagagcgttgtaagaacaggcccctggtttctggggctgtctcaattcccgcagcctggatatttctgttcgcgcagactggagcttttctgtggttactgtcatacgctggtaacgagacggcttggtggtgtggcgtatttggggtcttcccccttcatgctttttacccgctaatgaagagatggacgaattggccccaagcatggttgggcttagcgatgaattggggtttaccaacagcttggcttatggctgctccacaggacgttcaatccgatgcaatgtgggttctaacttttggaacgttctgttggacaatcttgtacgacaccatatatgcatgtcaggacaaaaaggatgacgcaaatgctggcgttagaagtacagccttactttttggtgcgtatgttaaacccatcttggcgctgtttggcgcggctttcgtgggtacgttggcctacgcaggtatgaggaccgggcaaaatgagttatacttcggaattaccgttggcggaaccgctgctcacgtcgcttggcagctgattacgctaaacgtcgatgatcccagtgactgcttcgacaagttcgttgccaacgggaatctgggatacatagtcacagccggcatgcttgcagctatgtgg

SEQ ID NO: 66 - DNA, 1803 bp, Artificial Sequence
  Description of Artificial Sequence: Synthetic polynucleotide
  FungalPT_66
atggccattagcacgacacaaaggtctagtcgtaatgtgtctaggggcatttgggagcttgcacgtctgcacactcgtgaggcttggctatgctggtatcctgccatatggggtgcttgcgtagctgccggcatgcgtgatgtaagtctggaattagcgccgtttctgcgtttactttttggcatttgggcctctgttactgcaacccattgtactttctgcacttttaacgatatttgtgatcaaaaattagataaacacgtcgagaggtgcaaagtccgtcctttaccggctggaatgataagcacttccgaggctatagtcgcgtttatctgttggttgcccataacgttgtcaatcacatggggcacgctaggtcccgcggtcacggtcgggttcataccggtatgggtgctgtctaccatatatcccttcatgaaaagaattatgcctttcccgcaagtcgtattaggtgctataataggcggggcggtgtttcccggatgggttggtattactggtgatctgaataatttggatcaagcccttcctctattcttcgcaactgctgcatgggtagtctactttgatatattctacgccacccaggatcgtcctgatgacgaaaagattggtgtgaagtcactggcggtactaatgggaaagaatgttcaggttttactggcagttttaggggcacttcaggtcctacttttcgctgttactgctctacgtgctgaaatgtctcttatattctgggtcttaggactaggggtctggatggtaattaaattactaatcacaatgaataggattgacgtccatcatcatttcattcccccagcatacgtgaacgcattcaattccactccgggcgatccatctggctggcatttacctaaatggaccccggaatcaactctttttctgatgaagagtcacacaacccgtacagctatccttagtctgactgcacccgggacctcaataataagcaatagtccagtcgagagcgcaaccttagcgcgtcaaatcaacctgtatgggtttcagttacaccaggagtacccgaccaggttcggatttttcgccagtcttccccatcttacgccggaaagcatcacaagtgcgatagaagaacttacatacgcgctggatgtgcttcaggcagacggaattacgttgtatacaagatactctggtacgggctaccttggccatattgcttttgcgcctttatgggaggagttaaaccgtaggaaggcggttgtctttatacacccaacaaatacagcgagtgatgctcagaaccaacctgaaatggtaaacccgaacttaccgcagccaattatagactatcctcatgaaacctgtcgtgctgcggtcgatctaatcaccagtggtactatctcaaagaatcctgacgttaaaattatcctgtcccacgggggtgggaccttacctatcctggctacaagagctgccaatctgttatatgacgccgggctgactggtattacaccagaaagatttttagagcaggcccgtggattctactttgacttagcattgagtgggaatcaagggaatttagggttgttggttggccgtaacggtttcgctaaaacgggccacgtgctatatggcagtgattttccctacgcgcctgtagacaccattaataaatatgttgagatgatggaggacttcttcgcccacggtggtgaaaaggagatagccaggggcgccgctgttgaattatttcctcgttttaaaattgaagaagacaacaaggagattctt

SEQ ID NO: 67 - DNA, 1230 bp, Artificial Sequence
  Description of Artificial Sequence: Synthetic polynucleotide
  FungalPT_67
atgagcagaaatggaatcttgtccttattaagcgggtgtagatctgctctgcttggaacttcatatgggattagtcgtcccgctctacgtgatgtggctatctacaccagaaccactacattaaaccccctaaaaggttctgagcctggccgtaccctaccgcagagattctttcacaccagagaccgtttatcacagagtaccaccgtatctcatcttttagggtcaaacacaaccaacatccaggggagcactaatgatcctgcaccttatacgccacctactacaggtttattgtccaaacttcctccgtcctgggttccttatgcagagctgataagactggataagccgactgggacctattatttgttctttccatgtttgttttcaacattgttggcagctcccctggccatacctacggcttctcccctatcagttataggcacatctttcttattcttctccggtgccttagtaatgagaggcgctggctgcaccatcaacgacttgtgggacaggaacttagatcctcacgtgtctaggacacgtttaagaccgattgcacgtggagctgttacgcctttcaatgcgttagtattcactggggcgcaactatttaccgggctaggtatcctgctacagtttccctaccagtgtctgttttatgggataccgtcattgttatttgtggctacttatccacttgccaagagggtaacgcattatccgcaattcgttcttggtctgacgttctcttggggcgccatcatgggcttccctgctttaggggtggatcttctgtccaaccacgctgcaatgacagccgcgggctttctgtacgccagcaatgttgcttggactgttttatacgacatgatctatgcgcacatggatataaaggatgatgcaaaagcgggaattaggtctatcgctctacgtcatgacgaacaaacgaagaagatactttctgggttagctgtcgcccagatcggactactgactgcagcaggcatggctgcgggggccggtcccgtgttctttgtggggtcctgcggcggagccgcagtcactctagcggtgatgataagaagagtcaacctcaagagtgttaaggactgctggtggtggttcgtaaatggatgccttctgactgggggcgctataagtgcgggattaggtggagaataccttgtgcaatgttggcagagaaagaaggaggaagtg

SEQ ID NO: 68 - DNA, 1074 bp, Artificial Sequence
  Description of Artificial Sequence: Synthetic polynucleotide
  FungalPT_68
atggcaaaccctaaatcccaaaaagagaattatgtagcccatactgtatcagagaggggtagtaggttagagtacaaagcaccatccaacggtatcttttctgtattgccaaaatcttggaagccttacgcggaacttatgagattggacagacccgctggctttttcgcattctactggcattatcttgttggtctaggatacggagttgccatttgcaaaccaataccgtcacctatcgatgtctctctggtcgccgtataccttgccgccttagtcgtagtccacaggggcgcggtgtgtactatcaatgacaatttggatcaagagttcgataggaaggttgccagaacccagtttcgtccgatcgcgaggggagccgtgagtactacgcaagcctacatatttgccagcattcaatatcttattctgaccagtatgatcctttggcacccgtactttcattcccatgacatctacacatcattacctactataatacttacggtgtatccacttgctaaaagagtgactgatttccctcagttgattttagggtttggtttcgctgctgagattcctttctctgcaatcatcgttggtttggacctgcagagtgctgagcatgctttcggtccgctgttaaacttgtttgttgcttctgctatttggaccattatctttgatacgatctatgcacaccaggatctgaaagatgacgtgaagacgggagtaggtagcttagcggtcagattgggccagcatagcaagccagttttaagcgtactagcaatagtacaggtggcattacttgtaacggccggtgtccaaagtgcattctcacccgtatacttcgtaatatcctgcggcggtgcgggtttagccttattgacaatgctggtcagagtggaccttaaatcaccagccagttgcgcatggtggttcggtaaaggcacggccgttgttggtgtaagccttgtaaccgggctgttaggggagtatgtcgcaaggaagtatgtcacattagagagcagctacgctgtgttatccggtcaatggtatacggatgtggca

SEQ ID NO: 69 - DNA, 948 bp, Artificial Sequence
  Description of Artificial Sequence: Synthetic polynucleotide
  FungalPT_69
atgggcggacgtgcgcagaacggcgaggatgaagctagagggaaggttctgtcatctttacctccgtcattggtcccctatgcggagttgatgagggttcacagacctctaggctattatctaaacaccagcccgtacgtggttggagtggtttttggagcagctgttgcaccaaccaaacttccggccaccatcttgctggatcgtcttcttatattggttctttggtccctatttctacgttctgccggttgcgtctggaacgatgtgattgatatggacttagacagacagattgcgcgtacaagacttagacccttgcctcgtggcgcggtaagctcttggaacgctgtcatgttaactgctggtatcttcgcttgtggtggcagcttgctatcattccttccccgtgagtgcgctattgaggcgctgattgaaatattcttcgcgctactgtatcccttcggcaaaaggtttacggattttccccagctaattctagtcaatatcggctgggcaataccaatgtctatgcactcccttggactagaccctttagcatacaagaagcctactttctttatgtttttgtttatagcacttgttatagtaatgattgatgtagtatattccagacaagacacagaggaggacatgaaagtgggcgtaaagagtatggcagtccgtttcaaacatagcatagagctactgagctacgctttcttctatgcctcaacaggtgctctgctggcggctggctattattctggcttggggataccgttcaccgtgctgtccgttggaggtcactttggcggctttttgtacttcctgaaaacaacaggtgtagggaaggctcctcaggtcgagagttacgctaagttggcgtgtttgatcgcgtctctcttttgggtggttggtctatttgttgaatactacctaagggtg

SEQ ID NO: 70 - DNA, 1245 bp, Artificial Sequence
  Description of Artificial Sequence: Synthetic polynucleotide
  FungalPT_70
atgctggctcgtcaacttgctcatgggggcctaagatgtcacttggctaatgcccgtccggcgaggtaccagcttctgaaccgtgcatcccactggctgcatcattcatctacccataggccgttagtggctaggccggctgcaccaagaccgctgtcaagcgcggcggggtcacctgaaagacctagttttctatcattacgtaggagtcaccaggccgcttctgcagcgccgccaccggagttagagccttacagcccaccaaccgcaggaatccttagtcatctaccgaaatcctgggtcccttacggagaattgataagacttgataaaccaactggaacctactacttgttcctaccatgtttgttttccactttactggcggctcccctagctacccctatgacccctcctttaaccgtgctaggtacatcactactgttctttagtggcgcactgattatgaggggagcggggtgctccattaatgacctttgggaccgtaattttgatccccacgtggcacgtacgagacataggcctatcgcacgtggggctattaccccattcgcagcactaacctttaccggatttcagttattggcggggttgggcatcctgctgcagttccctttaagttgtctatactacggtatccccagtttggcgttggttgcgttatacccgcttgcaaagagggtgacctattaccctcaagctgttttaggcctaaccttcagttggggtgctatcatgggattcccggctttggggatcgaccttctggcttcaactccggcgctgaccgctgctgcctgcctgtacggatcaaatatagcttggactgtgctttacgatatgatatatgcccatatggatataaaagatgatcaaaaagcggggatcaaatctattgctttaaggcatgatgccgagactaagaaggtactgtccggattggccgtagtgcaaatctctttgttagcagcagctggtactgcggctggtgccgggcccgccttcttcgtgggcagctgcgggggcgcggcggttagtttggcatggatgattaaaagagttaatttgaaatctgttaaggactgttggtggtggtttgtgaacggttgctggattacaggtggtgtaatagccgctggactggggcttgactatgcagtaaggtaccttggagaggcagaatctagtcagaaacttgttgcggcaccaggagaggacgactta

SEQ ID NO: 71 - DNA, 1098 bp, Artificial Sequence
  Description of Artificial Sequence: Synthetic polynucleotide
  FungalPT_71
atggaatcaatcatcgccaggccccgtacgaggtcatccgctaaagagaagacccaaacgatgtctgctaaaaagatcagtgcgaacggcaataacattgcagtccaggctaaaagcagaaggaacaccccattaggcgtcataaaactagctaggctgcacacactggaatctttgttatgtgtatacccagccatatggggtgcctgcctatcagccggttcacaccaaaaggtgttcacaccaagttcattccttagcgtcttgttcgccaattggatatctatgactatagcacacatggctttctgtactttcaacgacatagtagacagaaattttgacgggaaggtcgagagaacaaaggttagaccattaccagctggtatgatatctctacgttccgctataatagctttcatcgttgagatggggttaaccgtttacattagctacgcgacactaggatttgacggagcccttgtatgcgcgccagtatggatagccagtacaatatatccctttatgaaacgtgttgtgcagtggcctcagcttgtgttaggtcccattattggcatggcagtttttcctgggtgggtctccgtcgcagggaacctagacactttaagagatgcagtccctatgttcttagctacttctgcatgggtggtatacttcgatacgatatacgctactcaggacacaaatgacgataagaaaattggtgtgaggagccttgctgtattattccacaatcacatgcatcagtttctgggctttttggggtccatacaaattgcgcttctgagcttcacggctcgtaaggctaacatgagtgctctattctggtctctgggggtctgtgtatgggggcttaatatcccatttcacctattaagccttgataccaaaaacccaaaaacgggtgggaaggtttttatgatgaatattctattaggactatggattacaattgtttgtgtcatcgagctatggactacgacagttatgcatctggatgtgaacgatttcctgcttaaaacagttgtgcataatattactttaacagcacaaaatattcgttcctctgtagcattt

SEQ ID NO: 72 - DNA, 1044 bp, Artificial Sequence
  Description of Artificial Sequence: Synthetic polynucleotide
  FungalPT_72
atggcaacccaggcccttaatgaaagtgaggtaagaacagtcgctactaacggtccagagtacgtaccgccgaaagcgggacttctttctgtcctacccagcgcgtgggtcccatatgctgaactgatccgtctggacaaaccttccggcacttactacctgtttttcccgtgcttgttctcaaccttaatggctgcgcctatgacaatgccggtagtgtctcctggtacggttatcggaacgagcttattgttccttagtggcgccataataatgcgtggagccggatgcactataaacgacctttgggaccgtaacttggacccccatgtgacgcgtacccgtctaaggccaatcgccagaggcgcggtgactccattcaatgccctggtctacacaggggtgcaactgtttgcaggtctagggattttacttcagttcccacttccttgcctattttatggcgtgccgtctcttcttctggtagctagttatccactagcgaagagggtaacttactacccacaattcgtattaggcctaaccttctcatggggagcaataatgggttttccggcgcttggaatcgacctattatccaatagcgcagctttcgcggcagcgggtttgttatatgcctctaatattgcttggaccgttctttatgatatgatttacgcacatatggatatccgtgatgacgcaaaagctggcataagatctatagcattacgtcacaatgccgaaacgaagcaggtgttgacgggtctagcggtaactcaagtcgccctgttagctgctgcgggctacgctgcaggagccggtcctgtgtttttcataggaagttgcggaggagctttggcaactttagggataatgataaagcgtgtgaatctgaagagtgtcaaagactgctggtggtggtttgtcaatggatgttggataacgggcggtaccattggtctggggttagccggcgattacgcgttaaggtattcacaggacgctaaagacggcaagcaggacaatgtagtggagtctgtg

SEQ ID NO: 73 - DNA, 987 bp, Artificial Sequence
  Description of Artificial Sequence: Synthetic polynucleotide
  FungalPT_73
atgccttctcgtcgtgcgaatcgtgctgcggcatcagcacccagatacagcccgccgacaagcgggattctaagttatttcccgtccagttgggtcccttatgcggaattgattcgtttggagaaacctcacggcatatacatgatatggtatccctatatcatgggtttactatacagtgcaagaatttccgagaacacgctgagtctggaactgctgtgcaagcgtgcactagatttgaccatttggacattcatattgaggtccaccggttgcgcttggaacgacaacgtggaccaggactacgaccgtaagactgccaggtgttgtaaccgtcctatcgctagaggcgcgatctcaacggtccaagggcacatctacgtagcggcgctgaccggactaggcttcacaagtatacaacacttccctgtcgagtgtacttttgatgcctgcgcgattcttcttttagccgcgatttacccttttggcaaaagatttacacactttgcacaggtgcctttaggcgctactctgtctggtgcgattgtcatggcgcagcatagcgtgggaattgatcccctgtctaacgaaaatttgcgtccaactgcttgccttgttgtaagcattatattgctagtggtgttttatgacgttgtctatgcgaggcaagacacagtagatgatttaaagtctggtgtgaaaggtatggctgtacttttcaggaattggattaaaaccctacttcttagcctggtgagtggcatcgcagcgttattatttcttgctggcagattcgctgacatgcgtagggcatttttctatagctccgtgggtgggacggctcttggcttactgactatgattatggtaatcaacacatcccaagttgccaggtacgcggggcgtttctatatcctggctataggctgtcttttgggaggatttgcggtcgaatgttatgacaaatacgaagccgtcttcacttgg

SEQ ID NO: 74 - DNA, 981 bp, Artificial Sequence
  Description of Artificial Sequence: Synthetic polynucleotide
  FungalPT_74
atggcaaggaccagtgagaaaactccgttggtacgtcgtgaggcggaacgtcttcctttccctcttgggctagtttcccccggcgtaaggccgtaccttgaacttatcagatttcataaacctacaggtacgatcttaatgttctggcccttcgcgtggggtctgacaatggctgcgtatcataccgagctaccactgaacaggtattgggtggaattagctaaaagcctattcgccgcgtttatcgttagaggatctgcttgcacaattaatgatatatttgatcgtaagttcgacgctggagtagagagaaccaagggaaggcccttggcgagtggcagagtttctgtattcgcggcggtagtctatctgatcctgcagtatatcgccggtctggttgtctacgtatcttacaatgagatcgccctgtatgccgcagtattacaattgttaccacttttcttagtttatccgttaatgaagagaataacttactggccccaagcctggctgggcatttgtatgaactttggtttagtagtcgcctgggcggcagtgactggtagcctagatgctcagcttctgggagttctgatggtaggcacctgggggtggaccatgcactacgataccatttacgcctgtcaagatcgtagggatgacgtcaaggttggggtgaagtcaactgcggtgatgcttggcgactacgttagacccttctgcttcgtcctgagtatgatgtttgtcgggactttatattatgctggtgtattaaaccatcagacgccttactatttttacatttccgtaggtggtactctgttacacattttgtggcagtatgccacggtcgatcttgattcccccgactcttgcggactaaacttcataaggaatggacacatgggctggatcacttgggcagggttgatggtagactatctggtcaagatcgatcagttgccatttcagctacctttc

SEQ ID NO: 75 - DNA, 915 bp, Artificial Sequence
  Description of Artificial Sequence: Synthetic polynucleotide
  FungalPT_75
atgcctagccgtgcaagggctcttttcgaactaaccagacttcattggtttcccgtcggctctgatttcatgttttggccgtttgcatggggttctttggcggccagttatcatgtcgcattgcctatgaacgaggtagtggcgaatacactattttatgccctattgggcacgcttatccacagcgcaggctctataataaatgatatattagatagggacttcgacaggaaggtcgagaggagcaaagggaggccgatcgcatcaggagcggtcgccatgacggaagcgtctgtgttgttgataatgctagttgcagcgattttctacatgttctccacggcaggccccacagcgtttacattgagccttgtcgcgcttccggcttcaggaggatcttatcccttgatgaagcgttggatctactggcctagtttgtaccttggttttgcgacgtcttgggccgtgcccttgacttgggtagcgattacgggacaattcgattggggaataatcttaaacgtcaccgtagcctcttgttgctggacgtgcatatatgataccatatacgcatgccaggacaagaaagacgatgaaaaagctggggtccgtagtatggccgtcagattgggagataatataagacttgctttgtccgtgtttgatgtagtattcttcgcttgcctgttatgggctggatacttaaatggccatcatctaacgttctatgtaatgtccgtagttgcaccattcctttgtttgtggcacatttggagctttgaccacaatgacccacaagactcctggaaaaagtttactgctggtagacatggggctgcactggtttgtgcgggattggttgcagatcactacttcaatctggccccggaaagggcattttggttagactccaga

SEQ ID NO: 76 - DNA, 927 bp, Artificial Sequence
  Description of Artificial Sequence: Synthetic polynucleotide
  FungalPT_76
atgtatagtcgttcttggattctgaatgctctgccggctcccttagttccctattgcgaattaacccgtgtaggatacctgcccatcggagtgctagttagttaccttccagtgctggtagcgatacttcatgtagccgcagtcgccagattgccatacgataacattcttgatagttgtttgcagtggctgccactatgctatgtgtacagtgcctatggatgcgtggttgatgacatagcagaccaagacttagacaggaaggttgagagatgccaacacaggccgctggtaagaggtgcggtgtccactacatccgcgtgcctgttcgctgcatccctggcgtccctggcggtattcctgacgaaaacgttctttcctgaccagcccgctgtccatatcccggtcgctctggcagggagtatcatctatcctttcctaaaacgtttcacgaacttcgccttgctgtacttagcgttcttgtatgtagctaccgggctgaacgcttcaaggactatagggtacgatatcctgagtgcccctgatcacttgctgacttcaaacctacttcttgccgctgcggtattcattgcgaacgtaagcgtggaaacaatttacatgcacgccgatttggaggacgatattaaatctggcattggctccttggctgtcaagatccaaggctattctaagccagttctgttcctagcggccgtggcttacggatctttagtgcttgcgagcggacttgcagccgagtttggaaagtggtacttcaccggggcgatcacctccgcgctgaccctattcactcttgtagctcgtgtggacctgaagaacgggaaaatgtgcgagcagttcttcttcatggggaatgcggtcttaatgagtctactggcggcgggattatacggcgagtgcattgca

SEQ ID NO: 77 - DNA, 1191 bp, Artificial Sequence
  Description of Artificial Sequence: Synthetic polynucleotide
  FungalPT_77
atggctgcagatgttagagccaataatcattgcctgttaggtaacttagtaaattacgccgataatacgcagatcatcccagtcaacctttcagtcgtcttcttgcgtcagctaagtaactattgtcacctaaccgcagagccgccctcacccacgtggtggtggtattttaagctaactagattacataagtttcctgccggctctatcttattgttctggccttgtgcttgggggatagctatgagtgcatatagggtgaaccttccgctagggcaagtcataacgcagacagtcttatacttgcttgggagcacattaaggcataacgcggggtgtatttggaacgacatttgtgacagggactttgatagacaagttgctaggtgcaaaacgagacctctagcttgcggggcagtatctgtcaccggggcggtggtgctgtttatcgcacatctgatcgcgtgttctatattggtaaaattaagcggctccgctggcttcaggattgggcttgtggggctatttttcattgatacactttatcccttcatgaaaagatggaccaactggcctcaagcgtggctgggactggcaatcacttggggattaccagtatcctggatttccatccgtggtccagcggacctagatgccatgttcgttttgttcgttggcggagtttacaggcgtgatgacgtcaaagccggggtcaggtccaccgctgtcttgttcggtaataatgtgcgtcctattttagctatcttcgcggcattatttgttggatgtatagcgtacgctggcgtgagaaatggtgcgtcttacagctactttgcactgtccgtcggtggtacagccctgcaccttgcatggcaattgagaactttagatttcgataactctgcagaatgctgggatatgtttacattgaacgggaatcaactggggatgattatttggggcggaatgttaggagattatagccacgtcatctctgacgtccagttgaactttaggcataagttgtcacaggccgtgagacgttattcaactttcaacgttcaatgcacaactcagatgattatttcagtgagacacggtcgtacaagtggtaacaggtctgaccaattgcaagcgcctaacgctaacaagttttggagggcctctaggaacaagcacttaactattcaa

SEQ ID NO: 78 - DNA, 948 bp, Artificial Sequence
  Description of Artificial Sequence: Synthetic polynucleotide
  FungalPT_78
atggcaacggtggaagagaagttgctacccaaaacagagatgcctgataccaactatacgcataaaaggctgcgtgccatctgggaaatggggagactacatacgagggaggtctggctaattgtgtgcccagctctgtggggcgcctctataggagcaaatgccggggagactagcggctggagcttgacgtgggctctgttcggagtgtttgctagtacgggcttatcccatgtagctttctgcacatggaacgatatatgtgacgttgagtacgataagcaggtcgagcgttgtaaaacgagaccccttccctcaggactaatatccaggaaagaagcgacgttcgtctttttgggtgaacttttgttatgtgccggggttacttggctaaccctgggcttgcaggctaccttagccatcactccggcttggcttctaggctttatctaccccttcatgaagagaattatgccctttccccaagtcgttgtgggctttagtgtggcaagtggggtgatgccaggatacgtggccgtccgtggtactttagagttcactgactctctgttagcgttgtttgcggccacgacgtgttggataatcttcatagatactgcgtatgcgattcaggatatgttagatgatgcaaaagccggtgtacaaagtctggctgtgttcctaggccagagggtaaggtggtttttggcactaagcgcaggtatcacgatcattctgttcgccgtggccactttcctatcatctctgtctctgttttattggattttcggtgtagggatctgggcagttcgtatgatgagaagcctgtacttccttgatctgtctgacacggcctccgctggacacgttttcaagtctaacattgagtcaggcttgcattttactatagtaaccttggtagaaggatatctacaagcatgtgtattt

SEQ ID NO: 79 - DNA, 966 bp, Artificial Sequence
  Description of Artificial Sequence: Synthetic polynucleotide
  FungalPT_79
atgccgccctccagggtaagtgccctaccgaggtacagtccgccgacaaagggttttctttcctacgtgccttcctcttgggtgccttatgttgaactaacgagattcgagaaaccacatggtatctacatgatattatatccttacattatgggactgttgtatgccgctaaaatcgcaccagccccaatttccctatccttcttcattagtagggctatcaccctaactatatggactgtatttttaaggagtgcgggttgtgcctggaatgacaatgtggatcaagactatgacagaaagaccgcaaggtgttgcaatagacctatcgccaggggtgcgataagcacacttcaggggtatgtttttaccacggtcttagtcctatttggctatttgagcttacaagacctgccaattgaatgtaagatggacgcgacagtaactttagcgttggcctgcatctaccctttcggcaaaaggtttacccactttgcacaagtccctctaggggccaccctatcaatggcaataatcagcgcgcagcattctgtaggcgtcgatccgttcagccaagaaaatatagtccctacggcctgtctagtgtcaagtataattatgttggtcatgttttacgatgtggtttacgcgaggcaagatactgctgatgacctaaagtccggcgtgaaggggatggcggtcctatttaggaattggattaaaactctgttggtctctctgatagcggggataacggcattattatataccgccggtcatgcggtaggaatgagcgcgctgttctttcaattaagtgtagctgggccggctgtctcactattgttgatggttaccctgatgagtattaattccaagaaatatgcatggtacgcaggtaagtcttatgtgctggccatcgcttgtttattatctggttttagtgtcgagtactataagacgatagtc

SEQ ID NO: 80 - DNA, 957 bp, Artificial Sequence
  Description of Artificial Sequence: Synthetic polynucleotide
  FungalPT_80
atgacggtttccactactccaaagtctcaaagaaatgtcgcccgtggagtgtgggagctggcgaggttgcacacaagggaggcctggctgtgttggtacccggctatatggggagcgtgtgtggccgctggcatgagggacgtgagcctagagttagcgccgtttctacgtttgttattcggtatatgggcttctgttacagccacacattgcgcattttgtacttttaatgacatctgcgaccaaaagttggacaaacatgttgagcgttgcaaaattcgtccactaccttctggcatgatctctacaagcgaggccgtggtagcgtttatttgttggttaccagttaccttggctattacgtggggtaccttaggcccagcagttatggcgggattcatcccggtatgggtgctatcaactatatatcctttcatgaagcgtatcatgccctttccgcaggttgtattgggggccattataggaggagcagttttcccaggctgggtaggaatcaccggggacttaaaagacctggaccaggcacttccactgttcttcgcaaccgcatcctgggtcgtctacttcgatgtgttttacgcaacacaagataggccggacgacgagaagataggagtgcgttccctggccgttctactaggtaagaatgttcaaatattactagcggttttgggagcattgcaagttttgctattcgcggttaccgcgcttcgtgctgacatgagtttgatattttgggtacttggcttaggtgtttggatggttaatgtaccctggcatatcctatcactggatcttaaagataggcactcaggaggtcgtatcttcaagagcaatatcaagttaggcctgtacttaaccggagtttccttattggagttgtttgttgtcagagtgtatgacatatctcttgcgaacatgaaaatggaattacac

SEQ ID NO: 81 - DNA, 969 bp, Artificial Sequence
  Description of Artificial Sequence: Synthetic polynucleotide
  FungalPT_81
atggcaagtgctgctgccgattctacgccgaaaactcccctactaaacaaacaaacttcatccgctttttccaagcccaggtggagattgtattgggagcttgccaggatgcacaagtttccctctggatctattctagtattttggccgtgcatttggggctatttgttgggaactaggggtaatccgagtggcgttacaacgctggcgcgttacttcatcgcctttctaataggatcaacgttactacattccgctgcatgtacaatcaatgacatatgtgatagagatttcgatcgtcaggtagaaaggtgtaagaatcgtccgatcgcaagtggtgcggtaacggtgtttcaagccacggtcttcttgctacttcaagtcggcatatttgtgttgatgttaacacaggcgaatcgtaccgcatttctttgtgggctgttcggggtctttccgctacacgctttctatcctttgatgaagagagtcaccaactggccccaggcctggttgggtttagcaatgaactgggggctgcccacggcctggttgatgacaagaccagaagacattaacagtgtaccaatgtgggccttgacctttggtactttctgttggacaattttctatgatacaatatacgcctgccaggataggaaagatgatgtagaggctggcgtcaagtcaactgcgcttctttttggagcctacgtgaagcccatcttatctctgttcggggctgtttttgtcggcaccctggcttatgcgggcattgcaacgggtatgccgcagccctactttattattagcgttgggggatgtgctttgcatatgatttggcaattaggcacgcttgatgtggacacgcccgaagattgctgtaaaaagtttaactcaaatggagacctgggttatatcgttgcgggcggaatgctggctgctatgtacactccggacttattcgtattt

SEQ ID NO: 82 - DNA, 1227 bp, Artificial Sequence
  Description of Artificial Sequence: Synthetic polynucleotide
  FungalPT_82
atgtccacatgcagaatacttccgcgtctacctttacgtcccccattctcccagactactaattcttataaaccgtgtcaccctcgtttgtcaattccaacgtcaagagcagtttcagcaccaagacgtctagctatcgaaacccacgcgtccagctctaccagatccttgattgcgtaccacacaactaccaaattgttaagtacagcgacaacaacaagtccgccgactccaactgctccaactacgacggagctaccatcatacacgccgcctcaaacaggccttttgtcagttctgccccaatcatgggtcccatatgcagagttaattagacttgacaagcccacaggatcttactatctgtacttcccatgtattttctctactctgctggcggcacccctggcggttcctacaacgccgccgctaaccgtgctaggcacctctttactgtttctagcgggcgcaatagtaatgcgtggcgcaggctgtactattaatgatctgtgggatcgtaacctggaccctcatgttgctaggaccaggctgcgtccaatcgcaaggggtgccgtcaccccattcagggctgtgatttttaccggtgcccagctattggcgggacttgctgttctgcttcaattccctttgtcctgcttcttctacgcgactccttcactacttttagtcgccacatatccccttgcaaagcgtgtaacgtattacccccaattcgtacttggattaactttttcctggggcgctataatgggatttccagccttaggtgttgaccttctacacaacggtgcagcacaggcggcagccgcatgtttatacgcctctaatgttgcttggactgtgctatatgatatgatctatgcacacatggacatcaaagatgacgccaaagccgggataaggtctatagctcttagacatgacagggagacgaagcaggtactatcaggcctggcggtagcacaggtcgcgcttctagctggcgcgggaattgcaacaggagcggggccagcgttctttgtagggagctgtgggggcgccctagtaacattgggtatcatgattaagagggtaaatttaaaatccgtaaaggactgttggtggtggttcgtcaacggatgctggataaccggcggtgctgttaccttgggcttaactgccgactatttggtcaggtatgcagaaagagatgatgaaagaagcact

SEQ ID NO: 83 - DNA, 960 bp, Artificial Sequence
  Description of Artificial Sequence: Synthetic polynucleotide
  FungalPT_83
atgccgcccgcagtcgtgcgtaacagtgcttacacaccgcctaccaaaggtatcctatcatgtttaccttccagctgggtgccatatgccgagctaattaggttggataaaccgcatggaatatacatgacaatttatccctatgcgcttggcctgctatacgcttcccagttgacatctgaaagtctgccacccaatgttgttttatcaagatttcttaacctggcaatctggacattcctaataaggtcagcgggctgcgcctggaatgacaatgtagaccaagactttgatcgtcagacggcacgttgcagggacagacccatcgccagaggcgcgataagtacattacagggtcacgtctttaccactgccctgcttgcgctaggttttctatctatacagaatttccccctggaatccaaaatcgacggtgctgcaacggttttgttaacctgtatctaccccttcgggaaaaggttcactcatttcgcacaagtaactcttggccttacccttagcgtcgctataatcttcggaccccacagtgtaggggcgaacccattgtcacaagggaactttctacctacaacttgtcttgtctcttcaataatacttctggtcatattctacgacgtggtatatgcaaggcaagacaccgtggatgatctaaaaagtggggtcaaagggatggcagtcttgtttaggaattggattactacgttactactaacactaatcattgctattctgacgctactgtacattacggcgagaagtcttgatctgggctgggtctttttcggccttagcgtcgcaggccccgccgtgagtttgctgacgacgatagctttgatcgcttccaggtcgtctagtagcaggtatgcaggaaagttctacgttttggcaattgcatccctactgtctggttttactatcgaatacctgagaacgataatg

SEQ ID NO: 84 - DNA, 1752 bp, Artificial Sequence
  Description of Artificial Sequence: Synthetic polynucleotide
  FungalPT_84
atgatatcaacaccggaggctttgttagcattcgcatgctgggttccggttacgttggctataacgtgggttactttagggccggcagtcgctgcgtcttttataccagtatgggttctatccgtgatataccctttcatgaagaggttaatgcccttcccgcaagttgtcttgggtgccatcataggcggggcagtgtttcctggatgggttggtgtgaccggcgagttagaacacctagatcaagcattgccactatttttcgctacagcggcctgggtagtatattttgacgtattctatgcaacacaagatttgccggatgataaaaaggcgggtgtaagatccttggcagtatggatgggtcctaacgtcaaaattttactgacaggactaggcattttgcagatcgcgtttttcgccatgacggccctacgtgcagaattatctttgatcttctgggtgttgggtgtcggtgtatgggccgttagcgttccttggcacgtattaagtttagatcttaaagacaggcactccggcggttgggtgttcaaagccaacatcaaattggggctatacatgacgggtgtgagcctattggaaatattcttgctacgtatgcaacacgctccgataaagctaagtgcatacacaatggataggatagatgtccatcatcattttatcccaccggcatatgtcgaagcctacaagaacacaccaggagatccttcaggatggcatctaccccaatggacaccagagtcttctttaagtttaatggattcccacaatacaaggacagcaattttatctctgacggctccaggaacttctattttagctcactcaccgtccgccagcgcgtctctagcccgtgaaattaatttgtatggggcgaaaatgcatagagaataccccacacgttttggcttctttgcctctctaccccatctgacgccagataccattcccgcggctatagaggaagttatttatgctttggagactttacatgcggacggcattacactatacacaaggtatagtggaacgggatatcttggccacgacgcctttgcgccgctatgggatgaacttaacaggagacaagcagttgtgttcatacatccaaccaacacagcgaccgatgcgagagaccaacctatattggttaaccccgctctgccacaaccaattattgattacccgcatgagacgtgcagaactgctgtagatcttattacgtccggtacgattagcaggaacccaaatgttaccataatcttgtcccacggtggcgggacgttgcccattctggcaactcgtgctgctaatttgctgtacgatgcaaagctaacgactataacgccggagactttcttagagcaagccagatccttttactttgacctggctttgagtgggaacgaagagaacatgcagagcctagtaggccgtaatggctttgcgaaaaggggtcacgttttgtacggctctgacttcccatatgcacccgtgcctactattaacaagtacgtccgtatgatgggactaagatccgcaagcagggctgaggatgcggtcgatcaggcgatcgcgagggattccgcagttaaactttttccaagattccaaatagcagctgatgtacgtagagtcaggaagacgaactattggggattcctgagtgccgggctgttgatccccgcgggtatatccgtcgcttattactaccgtattctggtgaga

SEQ ID NO: 85 - DNA, 1026 bp, Artificial Sequence
  Description of Artificial Sequence: Synthetic polynucleotide
  FungalPT_85
atggacgaagttaagatttatagcaggccttcccacggcattttcagattcatccccgatgcgtgggtcccatatgctgagttaatgcgtcttgacagacagtctggtttctgggccttctactggcattatctgataggattgggatttgcgattaatatccctccctttagtagcgacctagacttgaaggccctggttttcttggccgcctacttagggttgtggactattacattcaggggcatcacctgcacctggaatgacaacttggaccaagactttgatagacaggtaacgaggtgcagacttcgtcctatccctcgtggggcagtgacaacagcgcaggctcacattttcaccgcggctctaatagcccttggagcgtgtattctataccctttgggggattctacgagggctcatgccgtggttgatggcgtactgttatttatatatcccttattgaagcgttgtactaactatcctcaggtagagttagggtttggtctaagctacgcggtgttcatggtcgctgcaatgctgggaaaagatcctttagctccattattagaccaaagtagtctggacctgtcagcaggggtatctaaggtattgggggcaccccttgcacaatccgccgcttgcctttacttcgcgggcattatctggaccgtgatcttcgatactatctatgctcaccaagattacacagacgacttgaaggcaggagtgagaggactagccgttagacttggaaggcgtgggacgaaacctgcgtgttatattgccacggctgttcaagtttacttcttagttgccgctggccagttagcaggcttcggtgcttcttattatgctatctcatgcggagtaactgcgttactacttgccaggatgatctgggtcgttgatcttgaggactcaaatagctgcgcgtgggcatttggtccaggctcctcttatgtcggaacagctatttttgcaggcctgttggcggagttcttcgcgaaacgtcatggctat

SEQ ID NO: 86 - DNA, 936 bp, Artificial Sequence
  Description of Artificial Sequence: Synthetic polynucleotide
  FungalPT_86
atggcagatcaggagttccctgagaaatgttcccacgctcataagccattactgcactttgaagatacccatgcctggcacccgtacttagagttaataaggttagaaaagcccacggggacaaaattgatgttctggcctttcgcttggggaatgactttagccgcgtattcacagagtatgcccgtgtatagttatgtccaccacctagctggctgtctgttcggagcttttatagtcaggagcagcgcctgtactgttaatgacatattcgacaggaaaatagacgcatgtgtagagcgtaccaaaggccgtcccataccttcaggaagggtgagtgtaagagcagccgtcgtttacctgttggcgcaatatctagttgggattgctttcttttacgcgacaatggacggtctagcatttgcgatttatccgttgatgaagagagtcactgattggccgcaggcgtggcttggtctagcaatgaattttggattcctgacctcatggatatccgtgtgcggtgcgatgaattaccctctaattgccacgctgatgactgggtgttggtgttggactatgctgtacgacacgatttatgcttgtcaggataagaaggatgacgtaaaggcgggagttcgtagcacagctttagctttcggaagccatatccgttcactacttaccgtatttgctattacttttgtcacaatgtttacagccgcaggtgccatgaacggtcaaggtcttgcatactacctaatctctgtgggcggtatgtctgtacacttgatatggcaattcagtaccgtggacttggacgtgccagagagttgttggagaaatttccagtctaatggaacgttagggtggataatctgggttggtgccgctttggactacttatataagatgcaggtattctccgcgtttgtc

SEQ ID NO: 87 - DNA, 1098 bp, Artificial Sequence
  Description of Artificial Sequence: Synthetic polynucleotide
  FungalPT_87
atgtgtatgcaagagtactcaacatgccccacaattgatcacgacgggttgcataagatatgttgctacagccattctcaacatgattgtcgtgatcccgtaattgatatgcccccatgctgttacccgactttggtgagaaagcaaaagatgacagtcaatcccggatcaaggtctcaccatcctaaagcaggcctgctaagctacctacccgcagccctggtcccctacggcgagctattgcgtgttcatcgtgcattgggttactacctgaacacctccccctacgttgtaggaattgcatatagcgccgctactgcccctacgagactaccgctagaccttctattagacaggttactgctattgactctttggagctttattcttaggtcagctgggtgtgcgtggaatgatctaatcgacgttgacattgatagacagatctcaaggacacagtcaagaccgttagcccgtggtgcaatttcattacccactgcgacgatattcaccgcgtgtttgtttgcattaggttgcagtctatttctattcctaccaaggcagtgtgctttcgaagcaggaattgaggttttctttgctttactatatccgttcggaaagcgtttcactgaccatccgcaacttattcttgtcaacatagcctgggcaatacctatggcaatgcacagtttgggagttgagcctggtagacagattctgtctagtatttgtctatgcgtctttatcgctacggtgattgtcctaattgatcttgtatattctcgtcaggatacggaagaggatctgaaagttggggtcaagagtatggcggtgcgttaccgtgattgtatcgacactttggcctattctctgtttgctatcagcactcttgctctattattcggtggtttactgggaggcttacgtgccccttttgtagtgttcagtgtcgggggtcacattgttgggttctggacgttcctaagagcatcactgcaaaccggtcccgctggtgttgagagtcgtgcgaagagtagttgcttgatggctagtatcttctggttactaggattagggattgaatacgcagtcagagta

SEQ ID NO: 88 - DNA, 960 bp, Artificial Sequence
  Description of Artificial Sequence: Synthetic polynucleotide
  FungalPT_88
atgagtacaacgagacgttcagtaactacaagacctagtacctcctctcgcaacgtacctagaggaatctgggaattggctagactgcacactcgtgagagttggttgtgttggtatccatccatatggggtgcttgcgtcgccgccggagtatctgatacagttttagaacctgtggcattcgcaaggtttttatttggcatttgggcaagcgttaccgccacgcactgcgcgttctgtaccttcaacgacatttgtgaccaatccttagataagcatgtgcaaagatgcaaggtgcgtccactaccctctggaatgatatcaacccctgaggctctattagcctttgtatgttgggttccctttaccttcgctattacctgggcaaccctggggccagctgtcactgtttcatttatcccggtctgggtgcttagcgtcatttatccttttatgaagcgtttgatgccgttcccacaagtggtcctgggggccatcattggtggggcagtgtttccgggttgggttggtgtaacgggtgacctagaccatttagatcaagcattgcctttatttttcgccacggcagcctgggtcgtgtactttgatgtattttatgccacacaggatcttccagacgacaagaaagcgggggtaagatcactggctgtatggatgggtcctaatgtgaaaattttattggcaggcttagggatattgcagattgcgttcttcgctatgaccgctctaagggccgacttgtccctgatcttctggattctaggaatcggcgtatgggcggtgtcagtgccgtggcatgtcctttcattgaatctgaaggataggcatagcggtgggtgggttttcaaggcgaacattaagttaggtttgtatatgacgggagtctcattgttagagttagttctattacgtgtacaccacgcacctatgagagtctac

SEQ ID NO: 89 - DNA, 900 bp, Artificial Sequence
  Description of Artificial Sequence: Synthetic polynucleotide
  FungalPT_89
atgcctagtagggcgcgtgcgttgtttgagctgaccagactacattggtttccagtaggctgtgacttcatgttctggcccttcggatgggcgttcctgagtgcggcgtaccgtttgagtttgccggtcaacgaggtcgtcaaaactacgctattctttgcgctactgggcacgctggtgcattctgcggggtgcgttatcaatgacatgattgacagagatcttgacaggaaggttgaaaggtctcagggccgtccgatagcgtctggtgtcgtgacgagagcagaggcttccgttctacttgtggtgctggtagctgcgctattctatctatttagtacgtgtggtataaaggcttttacgcttggtgtagtggcacttccagtatgtattacgacctaccctctaatgaagagatggatgaactggccgtccttattcttgggctttgcaagttcatgggccgttccgggaacgtgggtcgccaccactgatcactatgattgggggatcatcttaaacctggcgattgcatcttgctgttggaattgcatctatgactccatctatgcctgccaggacgaaagggatgataagaaggcgggggtgcgttcaatggcagtacatctgggcaaagcaataaggccggttttgactatattcgatacaatattctttgcgtgtttactatgggcgggctatcttaacgaccagcatgtcccgttttatattatgggagtcctagcacctttcttgttatgtctgtggcacatctggtctttcgatcaaaacgatccgaaggattgctggaaaaagttcaccgccgggcgtcatggaggggcgatggtttgcgtcggccttatagtcgatcatcattttaaacttagtagtagtgacggg

SEQ ID NO: 90 - DNA, 1026 bp, Artificial Sequence
  Description of Artificial Sequence: Synthetic polynucleotide
  FungalPT_90
atggacgaagtaaaagtatactctcgtccgtcacacggcatattcaggtttatcccggatgcgtgggtaccgtatgccgagttgatgcgtctggataggcaatccggcttttgggccttttactggcattatttaataggacttggttttgcaatcaatattcccccattttcatcagacctggatcttaaagcactggtcttactggcggcctatttaggcctatggaccattacattcagagggattacatgcacttggaacgataatcttgaccagaactttgatagacaagtaacaagatgccgtttgcgtccgataccgagaggcgcggtgacgacagcccaggcacatattttcactgccgcgcagattgcccttggagcctgtattttatacccacttggtaatagcaccaggacacatgcaatcgttgacggggtcttattgtttatctatcccttactaaaaagatgtacgaattatccacaagtcgagttagggttcggactgtcctacgccgtctttatggtggcagcaatgctaggtaaagacccattagcgcccttgttggaccagagttcattggacttatccgcgggcgtttccaattttctaggagcccctttagcacaaagtgcggcttgcttgtacattgcaggtattatttggactgtgatcttcgatactatttacgcacaccaggactacactgatgatctgaaggccggagtaagaggattggcagtcagattaggtagaaggggaacgaagagcgcatgctatattgctactgccgtacaggtgtatttcttggtcgcggcaggccagcttgcgggtttcggcacaccgtattacgcgatttcttgtgggttgactgcgctactactaaccagaatggtctgggttgttgacctggaggatggcaatagttgtgcgtgggcctttgggcctgggtccagctatgtgggcaccgcgatttttgctgggttgttgacagagttctttgccaagaaacatgggtac

SEQ ID NO: 91 - DNA, 795 bp, Artificial Sequence
  Description of Artificial Sequence: Synthetic polynucleotide
  FungalPT_91
agagaatacacgcctcccaaaggattactatcaaaaataccggcatcatgggtgccttacggcgagcttataagacttcataggcccgagttcatatacttcatctacgcgccctttattgttggcctagcttacgctttgtgtattaataaggaaagggtacctgcattcactcttgcccatcgtgccggggtactttttgtgtggacattctttcttagaagttctggttgcgcttggaacgataatatagaccaggattttgacaggcaaaccgagaggtgcaggaaccgtcctatcgcgaggggtgccataacaacaactaagggtcatgtttttaccattgtgttaatttctttgggctttttatccattcgttccttaccttttgaatgtactttggtcggaattgtgacgtatgttttgacaataatatatccctttggaaaaagatttaccaattttcctcaagtcatacttgggtctgtactagcgatggcgatccctcttagtagttacagtctgggcttgccggctctgtcacctccgcatattgtgcccaccgcgtgcttgagtgcagctatagtttttcttatagtattttacgacgtattatatgcgtgtcaggacatagaagatgatctaaagtcaggagtcaagggtatggctgtatacttcagaaattatatcgaacctttactaatcaccgtaactggtctgattaccggttgtttagcgatgatgggaaagctgattgatatgggccagctattctttatgttttccgtgatcggc

SEQ ID NO: 92 - DNA, 885 bp, Artificial Sequence
  Description of Artificial Sequence: Synthetic polynucleotide
  FungalPT_92
atggaaagtgctcgttcaaacccttacctggaactaatcaggttctacaaaccaacaggaagcatattgatgttttggccctttgcctgggggctgaccgccgccgcctacaccacgaagatcccgcttggagaatatgctgtcttgctaatgaaatccctgctgtccgcattcattatgcgtagtagcgcctgcacagtgaatgacatttttgacagagacttagatgcgggcgtagagaggactaagactagacccctacccagtggtagggtgtccgtggtgaatgcgtgtctatatttattgctacaatatataattggggtactgtacttcagcactctgtccccgcttgcatttcgtgctgcactgatacaattgtttccgttgtttataatctaccctatacttaaacgtgtaacctactggccgcaagcatggttagggtttgcaatgaactttggtattgtagtagcctacgtccaggtgctaccggctgcgaatcgtaacctgttgagcttcatgttagctgcagcctggtgttggaccgtgtactacgacaccatatatgcctgtcaagatatacgtgacgacattaaaatgggcataaggtcaactgcaagactattcgggtcacgtataaggcttgctttgaccatgttgactctgggactggtggggctgttaacgctagtaggtagggtaaacaatcaaaggcttccctactttctagtctcagtcgggggcggagggcttcatttaatgtggcagttatgcacattaaatctggccgtccctaattcttgctggatagcgtttaagaggaatgggcaattcggacttattgtttgggcgggcatattcatcgattatgtgaaaacaata

SEQ ID NO: 93 - DNA, 1047 bp, Artificial Sequence
  Description of Artificial Sequence: Synthetic polynucleotide
  FungalPT_93
atgcaacgtgctaacgtgctgggaaaaagagagaaggaagtcgtagtttgggtggaggaaataaaggacggcaagatgagcccgacgacccaacccggttgctatcgtgcaccaacaagtggattcaattccaagctacccagtgcgtgggtcccctacgctgagctaatgagaatagaaagaccagccgggctttatgccttttacttcccgtatctaattggtcttgcatatgctgcatgtattgcggagccagtggtgccgtctctggaacatgtagtcgccttatctggcatcctactggtctggaacattattttgaggggtgcagcttgtgcttggaacgataatatggaccaggatttcgatagacaggtgaccagatgtcgtaatcgtcctatagcacgtggagcggtcacgacggttcagggccacgtgttcaccgccgtcttgtgtttgtctttaattcctatcctaacactattcccagcaagctgtacttaccacacgggggctatgcttttcctgttcggattatacgctctggcaaagcgtgtcacctattatccacaggtagtattgggattcccgttcgcgtgggcgatctttttctgctgcgcagcattgcaagtcgatcctttcggacccagggttttactacccacggtctcactatttgccgccaatgttttgtggaccatcagttacgacacgatatacgcgcatcaggacgtgcgtgatgacgtgaaggcaggcgtcaggagtatggcggtaagatttgcacactcaactaaattgttagtcgtgatgctttccatcgcacaggtcagcttactaatcttgacggggtggcttacagcgatgtctccggcctatttcgtgggcgcttgcgcgggcaccgcagtagcgttggggagcatggtggtaagagttgacttgtccaaacccagcagttgtgcttggtggtttcattggcagttctggttcgtaggcggtagtatggtctcaggtctttttggggattttgtccttcgtactggttttcac

SEQ ID NO: 94 - DNA, 1452 bp, Artificial Sequence
  Description of Artificial Sequence: Synthetic polynucleotide
  FungalPT_94
atggcaggagatgctacggccacagaggtcttcccggttatggactcaattgctgtcgcaatgggagacgtggaaagtcaattgcgtgttttccataacgtcagcagatttctacctactgacgatgcaaatcaggttttctggtggcgtacgaccgggcgtcattttgcaataatgatgcacgaagcccgttactcagaagcgagacaggttgagcttttgcttttctaccgtttcgtgatcgcccctcgtttaggtcctcgtccgacgagtgccacaccgtggtttcactccagggtagcgccgggcatcggggacgggagtccaattggatactcctggaggtggggtacgggccctgacaccaagcctttgataaggcactacatagaagccattggaccattgactggaactactgctgaccccctaaacgaatttgctgcaaaggaaatgctgtatcagttggggcaactggttcctggtgttgagctgcccctagcttggaagttcgccgcccatattagaccatcacttacggatgagcccacgagagccgtagctggctcttctatcctaatcgggttgcagtgcgccccggagagcgcggggatcgaggttatggcgggcctgatgacaagaagtccggcccaagtccctgaattacttcactccatctttccgagggctatgagagacgcgtatggacccgacgcaagtttagatggtctgaatatggtaagggatttcgtatgccacgatccgcaaggacaatatcttacaatattggggactacggcgatagactgttgtgcggcggcctctagcagattcaaggtgtatgtgaccacaacaaacacctccttcgcccatctagcagccgtcatgacgttaggcggtaggaagcctgaggccccggagagcttgacgcaactacaagaattatggtacgccttaaaaggactagaccctgaatttcctgttacagctgaaccgttgagttcagtatgtggggcggccaatggcacagcttcaggcaatccaaatgccaatgtcagcggagtgactttttatttcgacatacaccccaagtacccttttccccacatcaaacttcaggtggatatctcaaagcacacaatatctgaccttggtgcgatcaacgccgtcacagaatttttggctaggagaggacaagcggctgacgctcaggcatatctaaatgttgtccgtgcgatggtcccagatgaggagctgagaacccgtcgtggcctacaagccttcttcgccttcgcgtttaagaatggggcggtcgatataacaagttactttttaccgcagatctaccgtcgttatgcagaagtccaagcggagttggaaccgcgtaaggactgccagggtagatctgaactatcatccaaacttcaaaggaggtcaaggtttgacagctac

SEQ ID NO: 95 - DNA, 1005 bp, Artificial Sequence
  Description of Artificial Sequence: Synthetic polynucleotide
  FungalPT_95
atggcgcccccgagcgcaacaacaccacttgtaagaagggatgcgccgaaggccgagagattgccgtttccgctgggattggtatcccctggtgttcgtccgtacctggagctaattcgttttcataaagcggggctactgttgcctacaggcacgatacttatgttctggccgtttgcatgggggcttacgcttgcagcataccacactgaactacctttggatcgttactggatcgaactagcgaaatcactttttgccgcttttattgtccgtggaagtgcctgtaccattaatgacatcttcgatagagaatttgatgccggcgtggagaggacgaaggggagacccctagcttccgggagagtatccgtgtttgctgcggtcgtatatctaatcatacaatacatagttggtataatagtttacgtctcatacaatgacgtagcactttatgctgcggtacttcaactgttaccgttgttcttggtgtaccctcttatgaaaaggatcacctattggccgcaggcctggttggggatttgtatgaacttcggtttagtggtggcctgggcagccgttacaggtagcctagactacaaacttctaggagtattaatggtcgggacttggggttggaccatgcactacgatactatatatgcgtgccaggatagacgtgatgatgtgaaggttggagttaagtcaaccgcggtcatgttaggggactacgtaagacccttttgttttgtcctgtccatgatgtttattggtactttatattacgcgggtatactgaacaaccagacaccatactacttttggattagcgtgggtggcaccgcccttcatatattctggcaatatgcaactgtagacttggattccccagactcatgcggcttgaatttcatacgtaatggtcatatgggctggattacatgggcgggtatgatgatagattatttagtaaaaatagatcagttgcccttccgtatgcctttt

SEQ ID NO: 96 - DNA, 909 bp, Artificial Sequence
  Description of Artificial Sequence: Synthetic polynucleotide
  FungalPT_96
atgcccagcagggccagagctttatttgaattaacaaggctgcactggttcccggtcggctgcgactttatgttttggccgttcgggtgggcttttctatccgcagcgtatcgtcttgcactaccggttaacgaagtggtaaaaactactctattcttcgcgttgctgggaactttggttcactctgcaggatgtgtgctgaacgacatcttggattgtgacattgacaggaaggtcgagcgttccgagggcaggcctatagcctcaggagtagttaccaggacggaagcactggtcttacttgcggtattagttgcagccctgttctatttattcagtacctgtggtacaaaggcgttcacactaggagttattgctttcccggtttgcataaccacttatccgttgatgaaaaggtggatgaactggccgtctctgtttttgggtttcgcttccagctgggcggtccctggcacatgggtggccacgactgaccagtacaactggggtattatcttaaacattgcgatagcatcttggaactgtatctatgatacgatctacgcatgtcaggataagaaagatgatgagaaggcgggagtccgttccctggccgtccatttgggtaaggcgatcaggccggtcttaacgctgttcgatgcgacgttctttgtctgtcttctgtgggctggttatctaaacgatcaaagactgcctttttacatgatgtccgtattcgccccatttctgttgtgcctttggcatatatggtcttttgaccacaatgacccaagggactgttggaagaaatttacggtccgtctagcagcaatagccatgtatcccgagctatatatagtttggtattccaggcaggccgcgacagctgggaggtggagcgccctggat

SEQ ID NO: 97 - DNA, 918 bp, Artificial Sequence
  Description of Artificial Sequence: Synthetic polynucleotide
  FungalPT_97
atggccccgcgtgttgacaggaataatcacgatttagtcaggggcgtgtggaggttatttaggttacacacaatagaaggtctatcaactgtaagtattggttggttagcgttattcttttatgctatgcaacaagacttgccatttgccttggttaggagggcctttataggaatattagcgacgtaccaaattacacattgtgtgttttgcttgtggaacgatatttgtgacagagacttcgacgctaaggtggccagaacaagggatcgtcctcttcccagtggacaagtaactctgaccgaagctgttatagtttttgtgataggacttgctgcagcggtcgctcttacatataagattcttggagccgatgtcacagctattatggtgcccatatggggtcttagtacgatttaccctttatgcaaaagggtaatttgggcaccccaggttgtcttagggctgacgatggcgatgtgcgtccttccgccttggatggctgtaaagcctcactcaggcgatgtggggttattaccggcatcacttttcggtgcgatattttgttggttggtttatatcgacctgatctatgcctcccaagatagaccggatgacaagaaggcgggggttaggtcactggcgatattcttgggggactacctaaaggccggattaaccgtccttggagttgcgcagatcgtgtgttttgtggtcgctgctgcggaagcacaagtgggggttttcgtctggatatttggtatcgccgtctggtccgcgtctgtcccgtggagcattatctccttggacctacgtgaccgtaagagtggaggaaggatatttctaatgaatgctatactaggaatctatatggcagcagtctctggcatcaacgtcgtgtctcctgctatgtggtcc

SEQ ID NO: 98 - DNA, 963 bp, Artificial Sequence
  Description of Artificial Sequence: Synthetic polynucleotide
  FungalPT_98
atgccggcgactcgtacgccaatacatcctgaagcggcagcatatacaaatcctaggtatgagacaggcccgctgtctctaattccaaaaacgtggagggactattgtaggctgatgagaattgacaagcctataggatctcttcttctattatggcctacgctttgggcactgtggcttgcagggggaggcatgccttccatgaaaatcctgttagtatttgttcttggcgtgttcttcatgagggccgccggttgcgtcgtcaatgattacgccgaccgtaagtttgacggtcatgttaaaaggacagcgcaccgtcctttgcccagcggtgctatcagcgggcgtcaagccaggatattgttcgcaggtctggtccttgcctcatttttgctagtgctgacactaaatcgtatgactatattactttctttagccgggcttgctttagcgtggatatacccatttgttaaacgtgtttctaaccttccccaggtagtccttggagcagcattcggctggagcatcccaatggcgtatgcagcggtatctgaagcagttcctctgtcatgttggttgctgtttgcggcaaatatatgctggactgtcgcctacgatactcaatacgcaatggtggatagggacgatgatcttaaaataggcgttaagtctactgctatactgtttgggaggtttgacaatctgattcttgcggtcctgacttgcacaataggaggactgttagccgcgacgggggtaagtgttggaaatggaccctactactttctttttagcgtagcgggtctaacagtagctttactagcaatgataggaggcataagataccgtatattccacacctggaacggctattcaggttggttttacgttttagccatcataaacttgatgtcagggtattttattgagtacctggacaatgcaccgatattagctagaggt

SEQ ID NO: 99 - DNA, 993 bp, Artificial Sequence
  Description of Artificial Sequence: Synthetic polynucleotide
  FungalPT_99
atggcatccttacatccgtcagacgaaaaagctacttccatcccacagtcttcaccagcctctgcgccagaattttacgccccatatctacaattaatcaggtttgaaaaaccaaccggaacaatgttaatgttttggccgttcgcatggggttttacaatggcagcctacgctgcaggcttatcactagacgcgtactgtacgggcttgacaatgtgcttcgttaacgcctttattatcaggtctagtgcgtgtactgtgaatgatatatttgatcgtgaggttgatgctgtcgtccattgcttgctgtcatacgctagtaccgcttactctgcaagtaggccattgccctccgggcgtatttctgtacaagccgctacactgtacttgatgttacagtacgctctaggaataattagcatgtatttgacagaacgtggattagcgttgtggataggcctatttcagctaatacccctattcgcgatctatccactgctaaagagagtaacgtattggccgcaagcctggctagggttcgcgatgaatttcggatttgtaacagcctgggttagtgtggccggtacagataactatcccgtcctttttgcagctatggcgggctgttggtgctggaccatgctttacgacactatctatgcttgtcaagacataagagatgacatcaaggttggtgtcagatcaactgctatcctatttggatcttggattcgtccactgctgctgttaatcggaattgctttcgtttccttactggcggttgctggggctctaaacggccaggggatagcgtttttcaccgtaagcatcgggggcacaattattcatctagcatggcagtttcacacggtagacctggacatcccagaatcctgctggacaaattttaaaaggaacggcaagttaggctggataatatggggcgggctgatgcttgactacctaagcatccattctccacaactggaatgg

SEQ ID NO: 100 - DNA, 999 bp, Artificial Sequence
  Description of Artificial Sequence: Synthetic polynucleotide
  FungalPT_100
atgccggcaacccgtactccaattcatccggaagctgctgcatacagaaatccaagataccaaagcggtcccctaagtgtaatccctaaatcattcgtgccgtactgtgaattgatgcgtttggaacttccacacggcaacttccttggctacttccctcacctggttggccttttatatggctctagtgctagtcccgctagactgcccgcgaatgacgtcgtgttccaagctgcgctttacattggatggactttcttcatgagaggagccggctgcgcatggaatgacgtcgtcgatcaagatttcgatcgtaagactactcgttgtcgtgtacgtcccgtcgcccgtggtgctgtctcaacgactggcgctaatatatttgcgcttgcgatggtgagtttagccttcgcttgcatatctccattaccggcagagtgccaacgtctgggacttattacgacggtattgagcattatatacccgttttgtaaacgtgtgacaaatttcgctcaggttatattaggtatgacattggctataaattttattctagcagcctacggggcgggactaccagcagtagaagcgccatacaccttgcctactatttgcgtaaccacggccataacgcttcttgttgtgttttacgatgtggtgtatgctaggcaagatacagccgacgacttgaaatccggcgtaaagggaatggctgtccttttccgtaattatgtggagatcttgctaacatccatcacacttgtcattgctggccttttagctacgacgggcgtcttagttgataatggcccatatttctttgtttttagcgttgccgggcttctagcagcactattagctatgattgggggaatcaggtataggatcttccatacgtggaatagttatagcggttggttttatgccctggctatcttcaaccttcttggcggctatctgattgaatacttggatcaagtgcccatgttaaatagggct

SEQ ID NO: 101 - DNA, 1017 bp, Artificial Sequence
  Description of Artificial Sequence: Synthetic polynucleotide
  FungalPT_101
atgggtgaggtgcgtggatacagtcgtccatctcacgggttattcagattcatacccgatgcctgggtgccgtatgctgaattaatgaggttggataggcaagccggtttttgggctttctactggcactatctaattggcctaggtttcgccattaacatcccgcctttttccagtgacctggacttggaagacctggctctactagcaagctacctagcgttatggacaacggtcttcagggggattacttgcacttggaacgataatctggaccaagatttcgatagacaagttgccagatgtcgtgtgcgtccgataccgaggggagctgtcactaccttacaagcccacatattcaccgcagctcaaatagctgtcggtgcgtgcatattgtacccgttcggtcgttcaacattgatacatgctacggttgatggggtactgcttttcatttacccattcctgaaaaggtgtaccaactacccacaggtggaactaggtttcggtttatcatacgcaatatttttggttactgctgtcgtaggtaaagattcattagcgccgttgctggacccatcactagacttgagtgctagagtgagtaaggtagtcgaagcccctctagcccagtcagcagcttgtctgtatgttgcaggaatcatctggacggtcatttttgacacgatctatgcacaccaagattacctggatgacctgaaggcgggagtcagaggcctggctgtcaggctaggtagaaggggaactaggccggcatgttatcttgccggcgcagtccaattatacttcttggtgttagccggccagttagcgggcttcggagctgcctattatgctatttcatgcggggttactgctctacttttggcacgtatgatctgggccgttgacttagaggacggggactcctgcgcctgggccttcggtccaggttcaggatatgtgggaacggccatttgcgcggggcttttcgccgacttctttagtcgtcgtatc

SEQ ID NO: 102 - DNA, 978 bp, Artificial Sequence
  Description of Artificial Sequence: Synthetic polynucleotide
  FungalPT_102
atggcaaccaggcgtaacgagaaagaggaagttccaccgcagggtaaaattcttgatctatttcacccaggtatcgccccgtatgcggaactaatgagaatccaccgtttactaggtttctacctaaatacttctccgtatttagtgggtgtcgcgttctcagccagcatctcctccactaagattccaatcgcggtactgctgcatagagctatgctactttccatctggagcatttttcttaggtccgcgggctgtgtgtgggatgacctgatcgacatggaccttgattcacaaataagcagaactaaatctaggcctttgccgcgtggcgcggtctccccctccaacgcattattacttacggtagcactatttgcgtgcggtgggaccgttcttatatttctaccttgggcgtgcactgtggattgcttgatcgtaacatttttcgcgctgagctatccgtttggcaagagattcacggactatccacaaataacactgatgaatatagggtgggcagtcccgatggcgatgcacagtctaggacttgaccccttgagtcagatgacgcctacggtgtgtatgttcttgtttataggcagtgttattatcatgatagatgtgatctatagtaggcaggatacagaagaagatcttaaagtaggtgtcaaaagcatggccgtccgttttagggacagtatccaattattgagctactctcttctgtgcgcctcaacgggattcctggcgatggcgggcgttctgaccgggttggggttaccctttttcgtactgtctgtgggcggtcatttttgcggcttctgggtgttgcttagagctacacaggtcggtaagagttctggagtggaatcctacgcgaaatacaatatgcctaagcaagcgttcaggccgaggcccgaaacttcctgtgcaacttggcttctgagtaccagtaggaatgaaatggggagggcc

SEQ ID NO: 103 - DNA, 1275 bp, Artificial Sequence
  Description of Artificial Sequence: Synthetic polynucleotide
  FungalPT_103
atggcattacctcctagcgatagtaaagatccgaggccctggcagatcttatctcaagccttaggttttccaaactacgaccaagaactttggtggcaaaatactgcggaaactctgaatcgtgtcttagaacaatgtgattattctgtccacttgcaatacaagtacctggctttctaccataaatatattcttccgtcacttggaccattcagaagaccgggcgtggagccagagtatatatcagggctgagccacggtggacatcccttggaaatatctgttaagattgataagagtaaaaccatctgtcgtctagggttgcaggctataggccccctagctggcactgcaagagatcccctgaacagcttcggagacagagagttgctaaagaacctggcaactctactgccgcatgtagatctacgtctgtttgaccactttaatgcacaggttggcctggatagagcgcaatgtgcggtagctacgaccaagttgataaaagaatcacataatatagtctgcacaagtttggacctgaaggatggcgaggtaatcccaaaggtttattttagtacaataccgaagggcttagttacagaaacgccattgttcgatctaacttttgcggcaatcgagcagatggaggtataccacaaagatgccccattgcgtaccgcgttgtcaagccttaaagattttctgcgtccgagggtgccaacagacgcctcaataaccccgccgctaacaggtcttataggggttgattgcattgatccaatgttaagcaggttgaaagtgtatcttgctacgtttcgtatggatttaagcctgataagagactactggactcttggtggcttgttgacagatgcgggtaccatgaaggggttggaaatggtggagactttagcaaagacccttaaactgggcgacgaggcttgtgagacgcttgacgctgaacgtttacctttcgggattaattatgctatgaagcccggtacagctgagttggccccgcctcagatttatttccccttgcttggaatcaacgatggttttatcgctgatgcgcttgtcgagtttttccagtacatgggttgggaggatcaggcgaatcgttacaaggacgaactaaaagcgaaattcccaaatgttgacatatctcaaactaaaaatgttcatcgttggttgggcgttgcatacagcgaaactaaaggtccatccatgaacatctattatgacgttgtagccgggaatgtggccagggtc

SEQ ID NO: 104 - DNA, 936 bp, Artificial Sequence
  Description of Artificial Sequence: Synthetic polynucleotide
  FungalPT_104
atggctaggagggtcgagaaggagaacggctcaggacctatcaagtctaaccacgatttggtgcgtggggtgtggcaattattcaggttacacacgatagagggattgtccacagcgtctatcggctggttggctctattcttctacgccactcaacagcagctggcgtttgacctggtcaggaatgcttttatcggaatcttcgcaacctaccagatgacacattgtgtcttctgcttgtggaatgacatctgtgacagagacttcgatggcaaggtcgcaaggacgagggacagaccccttccatccggtatggtaacattaaccgaggcaatgtgggtatttgtgttaggagtctttgcaagcatgggggtgacgtattggcttttaggagcagatgtgacattgacgatggtacccatttgggtcctgagcttcatctaccctctttgcaaaaggattatatgggcaccccaagtcgtcttaggcttaacaatggcattatgtgttctgccgccctgggtggcagtccgtaagaactctggctcggctggcttgctgccagcatccctttttggagcaattttctgttggctagtgtacctagatttaatctacgccagccaagataggcccgacgatcaaaaggcaggagtgaaatctttagcgatctttcttggagattatctgaaggcaggactgacagtattaggagtccttcaagtggtatgttttgttcttgctgcttccgaagcgtcagctgggtttcttttatgggtttttggaatagccgtctggtcagccagcgtaccctggtcaattatgtctttggacacgagggataggaagagtggagggagaattttcttagtgaacgccattttaggtatttatatggctgcggtgtcaggcctgaatgtatcattagccatgtgg

SEQ ID NO: 105 - DNA, 1110 bp, Artificial Sequence
  Description of Artificial Sequence: Synthetic polynucleotide
  FungalPT_105
atgcctgtacttgtgaccaatgatggggcttcaatcacagtaatattttccgcgaaggccacaccggcccgtgaggtatatagaggcccgcacaccccagaacccgaagctgcagaacctcccgccagcccggaagcagtatattcaccgcccaaaacaggaataataagttaccttccatcctcacttgttccatatgccgaattaacaagaatggacaaaccagccgggacctactacttgtttttcccatgtctttggagtacgctgatggcagcgcctctgactgcgccaatggcaagccccgggtctgtaatcggcacgtcacttttgtttttctctggggcattcatcatgaggtctgcgggttgtagcataaatgatctttgggacagaaaccttgacccccatgtaacaaggacgaaattcagaccaattgcaaggggagcactaactccgtttcagggtttagcatttacgggcgcacaattattggtaggtttaggcattttgttgcaattccccacgtcatgtttattctatggcattccatccctactacttgttgcatcataccctctagcgaaaagagttacttactatccacaagctgttctagggttgaccttcagctggggtgccatgatgggattcccggccttgggagttgatttgttatccaacagcgccgccttgactgccgccgcatgcctgtatagctccaatgttgcttggactatcctgtatgacatgatttatgcacacatggacatcaaggacgacgctaaagccggaatcagatccattgcattaaggcacgacgctgagacaaaacaggtgctaaccggcttggcggcagtacagttgagcctactttcggctgctggttttgcagtgggcgcgggaccggccttcttcataggctcagtaggtggggctgctgtcacactaggagtaatgattaaaagagttaacctaaaaagtgtgaaggactgttggtggtggtttatcaacggatgttggattaccggaggggtagtaagccttggccttgcgacggactataccttgcgttacgtgcaagaggagaaacagaatatagaatctcaa

SEQ ID NO: 106 - DNA, 972 bp, Artificial Sequence
  Description of Artificial Sequence: Synthetic polynucleotide
  FungalPT_106
atggagtttcagtctaccccaaggccggctgaccgtagcgcacagatcctgacgtttaagaaaccttttaagcctatggtagacacgcatgcgtatatagaactgtctcgtctacacaagttcccaataggttctcttcttatattctggccgagcgtttggggattaacattagccgcgtacaggaccagtatgaactcaaccgcattcaaaacacaagtctttgcttttcttgtaggctcaactcttcttcattctgctgcgtgcaccatcaatgacatctgcgacagggagttcgataggcaagttgaaagaacaaagaacagaccattggttaccggtgccgcgagcgtgtttggtgccacagcctggactatcatgcaatgtatagccgcaatagcatgtttgtggttcagtaatgatttggccttcaaagtaggccttttagggattttccctctgcacgctctttatccgttaatgaaaaggtggacctactggcctcaagcatggttaggtttagcgatgaactggggacttccggtggcttggttaagtgggctaggaaattggatcgacatggatatccccgcgacactattcttaggctgcttctgctggactattgtctatgatacgatttatgcgtgtcaagacaagagagatgacgtgaaggcaggagtgcgtagcacggcgctactgtttgcctcatggataaaggaaatactatttctttttagcgtactgtttgtcagtgcactagcatatgtcggggtgaggaatagccaaggtcccgcatacttcgttatctccgttggcgggaccgccatccacttggtctggcagctgaaaaccttgaaggtggatgtaccagaagattgctgggcaaaatttgtcgcaaaccatcacatggggtatattacatgggcgggcatgcttgtcgatcttgctttccaactaagcgccaggagg

SEQ ID NO: 107 - DNA, 1050 bp, Artificial Sequence
  Description of Artificial Sequence: Synthetic polynucleotide
  FungalPT_107
atggcttctgttgctgcgcctcagcctccaacctctctgtctccagagccgcaagtgcagtctccggcagcctatgaggctcctaagacgggccttcttagcaatttaccctcaagctggataccgtacgctgaactaataagacttgataagccaactggtacctactacctatttttcccctgcttattttccacgctattggcggcgcctctagccgtacctattgcgtcacctctatcagttcttggtacttccctacttttctttagtggggctctaatcatgaggggagccggttgtacaataaacgatttatgggaccgtgatcttgatccacacgttaggagaactagactgagacccatcgctagaggagcagttacgcccttcaacgccttggcattcaccggggttcagctgttcactgggctgggaatcttactacaattccctactcagtgcctattttatgggataccgtcccttttgctagttgccagctatccactggcaaaaagggttacacactatcctcagttcgttctagggctgacattctcttggggcgcaataatgggatttcctgcactgggagtggacctgctgcaaaattcagcagcgatggctgcggcagggtttttgtacactagcaatattgcatggaccgtactttatgatatgatttacgctcacatggatattaaggatgatgccaaggctgggatacgttctattgcgctgaggcatgatgcacagactaaacaaattttaagtggcttggccgtaacgcaaatcgggttattggcagccgcgggtgtggctgccggggcgggacccgtatttttcgtaggaagttgtggaggtgccgcagtgacattggcaataatgataagaaaagttaatctgaaaagcgtcaaagactgttggtggtggttcgttaatggctgttggctaacgggctcagttattagtgcgggcttgggagccgaatatcttgtccaatattcacaacgttctgaccccgaagaaatggttgcgaaagacgta

SEQ ID NO: 108 - DNA, 1014 bp, Artificial Sequence
  Description of Artificial Sequence: Synthetic polynucleotide
  FungalPT_108
atgaccccttcagcagtagctcctaaggaatccctggcataccaatatggcggcaatcatagcactggatggctgggatatgtacccgctagatggttaccttacatccaactggcgagattaagtccacctgttggcctttttctgatttacatcccccactcattcggtttactatacgccgccatccgtcaacgtgccgagccttttgaagtagcctatgcgtcactgctgctgtttggcgcgtcctttttcgtctctaatgctatccacatctggaacgacctgatcgatgcaccattggacgcgaaggttgagagaacaagaaatcgtccaatacctagaggcgcggtctctccctcggctgcgttaatattttcagcgtcccaagcagtatgcgccgctttgtttctgcctctgttaaggggagatgttgctaaaaacaccattctgtccgcacccggattccttgcatggctttactatccatatgccaaaaggcacacatattggactcaaactgtcttagggatctgtttgagctggggaattgttgtgggagctgtcgctttagacgtggagccttattcctttcaaactgggcaggtggatatgccgctattgttattgtttgtggcttctacgctatggaccatgctttacgattcagtttacgggtttcaagacttagaggacgatgttgctgctggtatctactcaatggctgtgttgtttcaatataacatcaagttggtgttttggttaatagtagccatgatcgccgctgctttgggaaatatgggttactacgcaggtatgggcgcactatactatattatatcagtagggggtactacggcattcctgtcccttatggtcgcgtacgtcgatcttcgtagttctcaaagctgctggtggtggttctctacggggttttggtacgcaggtggttctatcgcaggtggattgttatctgagtacgtcacgatgatagcgagagcacctgggttcgag

SEQ ID NO: 109 - DNA, 1014 bp, Artificial Sequence
  Description of Artificial Sequence: Synthetic polynucleotide
  FungalPT_109
atggaatccccaagaaccggcggccagcccgctcctatgcagggagagcacataaatttctttccaaacttacccgcctattccgaccctacgacaggcgttctgtcaaagctgcctagttcatggataccatacgcgcagctgatgagggttgatcgtcccggcggcttatatgccttttatttcccatacctgatcgggatcacctatgccgcctgtatagcccctacgaccttagagccgctaaccttgttggcaatggcagccgtcctgcttcctgttaatatactgcttaggggtgcggcttgtacgtggaacgatactttggatcaggactttgaccgtcgtgtcgaaaggtgtagacacagacctgttgctagaggtgctgtttccactaggcaagcccttattttcactttcgcccaactggcagcaggataccccttactttctttctttccagcgccatgcgtttggcacatggtgattatggtactgttattctttatctacgccttcatgaagcgtgtgacgtactaccctcaggtagtcttggggttcccatttgcctgggctatcttatttagtgtcgctgcaatggagcttcctgtccagggagagtacgccgcaccaacgatggcgatatacgcagcgaacgtggtttggaccataatttacgacaccatatacgcacaccaagatatcgccgatgatgaaaaggcgggtgtccgtggcatggcgttgcgttttaggaactccaccaaactgttggcctctattcttgcaacgcttcaggtcgccctactggccctatgcggaatctgggctggcttcggtgtcatctatttcgttggcacggtctgcggtgttgccgccgctatgggttactatatctatgatgttgatttaacaaagcctgaatcctgcggtgcttggttcggggcccaattctggattgtgggggctggattcatggctggcttaacgggccagtacatgctgaattttgttcca

SEQ ID NO: 110 - DNA, 945 bp, Artificial Sequence
  Description of Artificial Sequence: Synthetic polynucleotide
  FungalPT_110
atggcaagttcttcacacgaatcagatccgttgatggtgaagaaagatcaggctcagaagttggcgtttcccttaggctacttcccagagggggttcgtccttaccttgaactaatccgttttcaaaaaccgactggaactgtcctgatgttctggccgttcgcctggggactgacccttgctgcttatcacactgagctgcctctgagtaactattggcccgaaatggcgaggtccgttttcgctgcttttatcgtcaggtctagtgcttgtacaatcaatgacatttttgaccgtgagttcgacgcaggtgtcgagagaactaaaaatcgtccgctggcctctgggagaatttccgtatttgccgcctgggtctggttgattgttcaatatctggtaggtgtcgctgtgtacttctcatataatcacgtcgcattttgggcagcgataatccaattattgccgctgttcatagtatatccctttatgaaaagaatcacttattggccacaagcatggttaggcatttgcatgaattttggtctggttgtcgcttgggccgccattacctctaatttagacgtaaaattactaggtgtgtttcttgctgggtgttggggctggacaatgcactacgataccatctacgcgtgccaagatcgtagggatgacgtgaaagttggggtgaagagcacagctgtaatgctaggcgattatgtcaggccgtttacagccctatgcgccgtactttttgtatcaatgcttgcgttagtaggggtctggaacaaacaggggcccatattcttcgtcgtttcagtagggggcactgttctgcacatgatttggcaatatgcaactgttgatcttgactcaccggagtcctgcggcggcacctgtctgcattctccgtgttgcacgtttttaatacccgggaggagtgaatta

SEQ ID NO: 111 - DNA, 1035 bp, Artificial Sequence
  Description of Artificial Sequence: Synthetic polynucleotide
  FungalPT_111
atgacaacggcgatagctccagatactccagaacccgcatcaccagaagccgtctactccccaccaactaccggcatcatatcttatcttccggcgtcttgggtgccgtatgctgaattgacccgtattgacaagccagccgggacttattacctgttctttccctgtttattttcaaccctaatggccgcacctatggcaatgcctatggcctccccggccagcgtcattggcacttccttgcttttcttctctggggctctgattatgaggggtgcgggctgttccattaacgatctgtgggataggaacctagatccgcatgttacaagaacgaaattccgtccgatcgcaaggggagccataacacccttccaagggttagcttttactggcgcacaacttctggcaggacttggaatcctggtacagtttcccacgagctgcctttggtacggtatcccttcacttcttttcgttgcaagttacccgttggccaagagagttacgtattacccccaagccgtactgggattaactttcagctggggcgcgatgatgggcttccctgctcttggaatagacttattgagcaacagtgctgcccttactgcagctgggctattatacacatcaaatgtggcctggacaattttgtacgatatgatatacgcccacatggatatcaaagatgatgtaaaggcggggattagatcaatcgcactgagacacgatgcggaaacaaagcaagtgctgacgggtttagctgctgtgcagctaagccttcttggggcagcaggcttcgctgccggtgctggtcctgcatttttcataggcagtgtcgggggagcagcagtaactcttggagtaatgattaagcgtgtgaacttgaaatccgtaaaagactgttggtggtggttcataaacgggtgttggattacgggtggtgtcatttccctgggtctggcagcagactataccgtcaggtatgtccaagggggtaatgaggacgctgcaggccagcgtcagttagaa

SEQ ID NO: 112 - DNA, 912 bp, Artificial Sequence
  Description of Artificial Sequence: Synthetic polynucleotide
  FungalPT_112
atgatctctacaaacccggctgggccatctccatcatggtggcgtccatactgggaactagccaggatgcataagttccctgctgggtctattctagtcttttggccgtgtgtgtgggggtatctgttgagtccgggttcagcagggctgtctcccagagagctaacggtgcatatctttgcactgttggttggtagtacgctactacattcggctgcgtgtacaataaatgatatttgtgatattgattttgataggcaagtcgagaggacgaaaaatcgtcctttggtgacgggcgcagttagtatcttcggtgcgaccgtgttcctggcactgcaagttcttgtcttcttcgctatgttagcctctgttaatcagactgctctgttgtgcggcacattcggagtatttcctttgcatgcgttttaccccttgatgaaacgtatcacttggtggccgcaagcgtggctagggctggcaatgaactggggcttgccgacagcatggttgattgcagcgccaagggacgtgaagagcacggccatgtgggcgcttacgttcggtgcgttctgttggacaatcgtttatgatactatatatgggtgccaggacagagaggatgacgtaactgccggtgtgagaagcacggcattgctgtttggtgattttgttaaacccattttggcgatgtttgcgactgtatttgtagcttcccttgggtacgcgggcgtggttacgggcagaagcgcagtttattttgtgttggccgtcggcggctgcgcggcgcacttatcctggcagttgctgactcttcgtgcagataaccctgaagactgttggcgtaagtttaacgctaatggctatcttggatatatagtggcaggtgggatgcttgcggaacgttatttagcg

SEQ ID NO: 113 - DNA, 978 bp, Artificial Sequence
  Description of Artificial Sequence: Synthetic polynucleotide
  FungalPT_113
atgcccgagcgtaactcccaattagccccagaggttcctgcgccgtacgaaaacccgaagtataacagaggacttctgcgtttagttcctaaagcatgggtcccatacggggagctaatgagactggagcttccacacggcctttatctatgctactttccactatttgtcggcattctacacgggtcagttatctcaccagttcccgttaaaccttctgagatcgcttatcaggcaactttatacttgggctggaatttcttccttcgtggagcagggtgcgcatggaacgacaacgtggaccaggaatttgataggcagaccggaaggtgtaagactagacctatcgcgcgtggggccgtctccacaacgggcgcgaacttgtttacgatgctattcgtcgcacttgcgttcgcatgcatatggcctttacctgccatttgcatcaaattaggggtattgaccacgggtttgtctctagtgtacccttattgcaagcgttacacctacttcgcgtccgtgatcctgggtattaccattgcggtgtcattcatactggcgacctacggcaccgggcttgagtctattgaagagaagcacagggctccgactatatatgcaaccgttgccatcgttttattaatcatcttttatgacgtggtgtatgctagaccagacattgtagacgacctgaaatccggtgtcaaggggatggcagtcctatttaggaattacatagaggtcttgttaagtatattgacccttgcagctgcgggtcttctggccctgactgggagggaattagggactgggccatatttttatcttttcgctgtcggcggactgacagccacttactttttcataattatacaattgcacagacgtgtctttgaaacatggacaacctcttccggctggctttatgtgtttgctgtcataaatttggcagctggttacttgaccgagtaccttagg

SEQ ID NO: 114 - DNA, 945 bp, Artificial Sequence
  Description of Artificial Sequence: Synthetic polynucleotide
  FungalPT_114
atgaccaatgcagtcgaggatagtgggcccagagaccttctgttccttttaatttcaacttcccgtttcaataggtacatgccttattatactatgatggccgcagagagtttgtccatagaatttatattgtataaggccggtctttgtttcgttcactgccttttattgtgcggggccggaaacacttggaacgatctagtggatcgtgatattgacgcgcgtgttgccaggactaagatgaggccgttggcatctggtagagtgacactaacggaagcgttgctttggatgaccgggcaatacttcctttcagtaaaaatgttggaccttatccttgacggacgtaacatttggtccttaatgttgccactaactgcgagtatcatgttgtacccgtatctgaaacgtccaatcttcagtaaagtttttgtatacccacaatacattctggggctcgccataggctaccccgctattaccggctgggcctccatcactggatctgaagaacccttaggagacatcataaagcactgcatccccatttgcctattggtcttcttctggtgcgtctacttcaatacggcctatagtcaccaggactcagtcgatgatcgtaaaatgaacattaacagcgcatatgtgatagcgggtcagaggatacgtctttttctggccttcttgagcgttctgccacttttgactataccctacattatatctactatcaatagcccttggctttgggtcagttggatggcaacttggacagtttctataattatgcagatcgcacagtttgatagccagaagttggagtctggaggtcgtatacactgggacaacttcctactaggcctgtggacgattgcggcctgcatggtcgaagtaggtctgcaaaaagtcgagttctggaagaatgttgaaggttacatcaggctt

SEQ ID NO: 115 - DNA, 798 bp, Artificial Sequence
  Description of Artificial Sequence: Synthetic polynucleotide
  FungalPT_115
atggcggcctacaggctacgtaccgctccctatgaccttgctgtacagctactatcatttttgctgggagcaaccttaattcatagtgctgcttgcgtcgcctccgatatatgcgatctggattttgatagacaggtagcacgtaccaagaatagaccattggtgtctggaagagtttcaatgagcggtgcgtacatttggactataatacaaaccttaggagccatattttgtctaagctacacaaactactacgcgttcagagtgggactgttgggcgtgttccctatacacgtgctttatccattgatgaaaaggtggacgtattggccccaagcctggttagggttaggtatgaactggggattgccagtcgcttgggtctacgcatttcgtgaaccgcttgacattgcaatccctactattctgtttttcggcacaatttgctggtctattttctatgatacgatttatgcgtgtcaggacaaagttgatgacgtgaacgccggcgtaagatccaccgccttactattcggtacgtggatacgtccgattctggcattgtttagtgtaatttttataggcaccttggccgcatcagggtatcttaacggaaatggggttgtatatttcttactgacggttggtggggcttctttacatttcatatggcagttaatgacgctggatattgacgaaccgaacgattgctggaagaagtttcaagcaaatcatacaattggctatataatctgggccgggatgttagttgactactacctattgttacagagcccg

SEQ ID NO: 116 - DNA, 900 bp, Artificial Sequence
  Description of Artificial Sequence: Synthetic polynucleotide
  FungalPT_116
atgccaagcaggatgcgtgcgcttttcgaacttactcgtttgcattggtttcccgtaggatgcgattttatgttttggccgtttggctgggcattcttatccgccgcgtatagattggcgctgcccgtcaacgaagtcgtaaaaagcaccctatttttcgcgctgctaggtatattggtacactccgctggttgcgtgctgaatgatatactagatagggaccttgacagaaaagttgagaggtcccaaagccgtccaatcgcaagtggtgtggtgacgagaacggaagcctctgttttacttgttgtattagttgcagccttattttacttattctcaacttgtggaactaaagcattcacgctaggcgtcgtggcgtttcctgtatgtattgctacttaccctttaatgaaacgttggatgaactggccgagtctgtttcttggattcgcatccagctgggcagttcccggaacctgggtggctaccactgaccattacaactggggcataatcttaaacattgcaattgcgagttgctgttggaattgtatctacgatacgatttatgcctgtcaggacaagaaagatgacgaaaaagcaggggtgaggtctatggctgttcatttggggaaggtgatccgtcctgttctaacactttttgacgcaaccttctttgtctgcctgctgtgggcaggctatctaaacgaccaaggtgtcccgttttacatgatgagcgcccttgccccttttctactttgtttatggcacatttggagcgtggatcataatgaccccagagactgttggaagaagtttacggctggtagacatggaggtgcaatggtttgtatcgggctaattgtggatcattgtttcaaactatccagtacagctggg

SEQ ID NO: 117 - DNA, 816 bp, Artificial Sequence
  Description of Artificial Sequence: Synthetic polynucleotide
  FungalPT_117
atgagcataattcgtaagtcagcgcagacattcgccatatgttgggaattagctagatttcacagtagtgaaagttgcctagaatggttcggggcgatgtggggagcactgatcagcgatatcatagataggcatgtggatgcgggagtcgagagaaccaaataccgtccattgccctctggccgtatatctgtccagggagcattggcgtcttgtgcattcttaactgccttagcaagtgctctaactcattattgcttaggctgggatacactgttactgagtatcccgatgtattttctaaatgcgatatatccatacatgaaacagttaatcccctggccgcaactggtactggcccctgccgtgggctggactactctaattggatgggcagcaatggctggtagtcttcacgatctggagaagtgcattcccttatttctggccacgtcatgttggactctgtattatgacacatgctatggaagccaagacgcagaggaggacaaaaagatcggggtaaaatctctgcctatttggctgggcacctcaatccatccgttcttagcgtttctgggcattctaataataagtttattaggacttagcgcacacgcatccaacgtaagttatatcttctggactttcgccataggagtatgggcgtttttgattccataccagattacgcaattggatctgaaagatcgtacctccggagggaagattttcaaacagaatatcaatttcgggaaatatgtaaccctagtcgcgtttgccgagcttgcgtaccaatcattcttcgctcgtttt

SEQ ID NO: 118 - DNA, 1212 bp, Artificial Sequence
  Description of Artificial Sequence: Synthetic polynucleotide
  FungalPT_118
atgttagctgttaccagatggccaggccgtagggtaataacccaaagatctcgtaattcatccatgcagttgcataacttcgtaagggccatacagggaaattcaactagccagctggggagcacgtcgagatttgcggcattaagcccacgtcctttccatttcagctcccagcacagaaccacaaccatcgaaagcccatcatcaccatcatcaccggccgcacctcaaatatactcaccacctacgactgggttgctttcaaggctacccccaagctgggttccctatgcagagctagtgagactggacaagcccgcaggaacgtattacttgtttttcccgtgtctattcagcacattacttgcggcgcctttagcagaacctatcgccagccccttgacagttatagggacttctgccttattcttcagcggcgccttgattatgagaggcgcaggctgttctattaacgatctttgggatcgtaatttggaccccaaagtcagtcgtaccagactgcgtccgattgcgcgtggggccattactccgtttaacgccttggcgtatacgggagtccagcttttggcaggacttggaatccttctgcaattccccttttcctgcttattctatggggtaccatcattattgcttgtagctatgtatccgctggccaaacgtgttacctattacccacagttcgtgttaggcttgaccttttcttggggagccatgatggggttccctgcgttaggcgttgatctattaagcaattcaagtgccctagcggcggctggttttctttatgctagtaatgtggcctggactatgttatacgatatgatttacgcgcatatggatataagggacgatgcaaaggctggaataaggtccatagctttaagatatgataatgaaacgaaaaaggtcctaagtgggttggccatagtaaagatcggtttgcttggtgcaacgggatgggcggctggagcgggaccggcattcttcatcggcagctgcggtggcgcagctgttaccctaggctggatgatcaaaagggtcaatctaaaaagcgtcaaggattgctggtggtggtttgtgaacggatgctggattactggtgggaccatatctttaggtctgggcgcagactacctagtaagggatttagaggacagacaacgtgaaacagaggtagatgagacgaga

SEQ ID NO: 119 - DNA, 942 bp, Artificial Sequence
  Description of Artificial Sequence: Synthetic polynucleotide
  FungalPT_119
atgtcagtcagagccggtaggcgtgctagttcccctattccccagagaaatacgcttcgtggagtttgggagttggcgcgttttcacactcgtgaatcatggctatgttggtatccctctatatggggagcttgcatcgcagccagctcccaaaatgttgttttggacccttatgctttcctaaaagttattttcggcatctgggtttcagtcacggtttcccacgctgcgttctgtacattcaatgatatttgcgaccagaatctggacgtgcatgttgagcgttgtaaaactagacctctgccttccggcatgatttctaaccgtaacgcggtgttagcgtttttactgtggatgcctgtaacggtttgggtcactaacgctacgctaggggacaaggcggtcattgccttcgtgcccatatggatattgagctttgtgtatccctttatgaaacgtcttatcccgtttccacaagtggtcctgggcgctacgattggagccgcagtgttcccaggttgggtggctataacgcaaaggttagacgacgtcggagaggccgtgccactattttgggcgacggctgtgtgggttgtttacttcgatgtgatctacgcgacacaagactcccctgatgacgagaagatcggagtcaagtcacttgccatatttatggcaaaacatatgactacatttcttagcgtattggcgatccttcaagtcgccctgtttgctcaggcggctaggcaagcacattcaagcctgattttctggatctttggcgtttgtgtgtgggctctaaacatgccttggcaccttttgagcttggacatttctgataggaaaagtggcggcagagttttcagagccaatattaagttagggttatatatgacaggggtctctatagcggagctgatcgtaaatcgtgtaaggcttagt

SEQ ID NO: 120 - DNA, 1122 bp, Artificial Sequence
  Description of Artificial Sequence: Synthetic polynucleotide
  FungalPT_120
atgtctcgtagacactcctctaggattggcgaaacctccgatagtagatcaaagcagactagccaaagcagcggcgagaaaagggagccctcaccgatgcccaggtcttcagagctaccggcggatatacccacgtctgctgggttcctgtcattactgccatcatcctggatcgcctatgctgagctaatgagacttgatcgtcccgcggggttttatgctttttatatcccatacctactaggactgggttatggtgcgtgtctaacggactccgtcccaagtcctacgcacctattatcgttgtgtggcttgttccttgtgtatagcataattctgagaggggcggcgtgtacatggaacgatacagtagatcaagaatttgatcgtcaggttgcgaggaccagattaagaccaatagcacgtggggccgtcagtaccacacaagcgaacctatttacagtagccttggtcttaacggagatacccgtctttataaggctacctgccgcctgtgcataccacgctatacccataaacatactgttcggcggttatgcgctaatgaaaagaatcacgcattacccgcaactcgtccttggatttccgttcgcatgggcaatacttatgtcttgtgcggcgttagacgtagatccaattagtcaccacagaatagtacctactatgagccttttcatggccaatatactgtggactatgatctatgacacagtgtacgcgcatcaggatattagagatgatattaaagccggcgtaaggtcgatggcaatccgttttgcttcaaacacgaaggagctggcggcaacattggctacagtacaggtcgcacttctattctgtactggctggcaggcaggcctaagtcccatctacttcgtattcacatgcgggggaacggcagtcgcccttgcatacatgatcgccgaagtagacttaaaagagccgagtagctgtgcatggttctttcacaggggtttttggtacgtcgggggctcaaccatgatgggcttcgcagctgagtacgtggcacgtttgtgcaaaagtgagatggtagacgacgggttctctcttaatttgttgtggactaaagcaagacccgcc

SEQ ID NO: 121 - DNA, 984 bp, Artificial Sequence
  Description of Artificial Sequence: Synthetic polynucleotide
  FungalPT_121
atgacggtacaatctcgtccctcaggaaaaggttatactccacctgctactgggctattaagcctgttacctagtagttgggttccattcgcggaattgatgaggcttgacagaccccaggggtattacgcattttactggcattacctgatcggcctttctttcgcggcctgtgacgtctcagactcttgcaccccgttcgagcttcttgtcttggcagcctatctaggattgtgggtggtcgtgttaagaggttcagtctgcacagtaaatgatatatgtgatcaagattttgacaggcaagtcgcacgtacccgttttcgtccgttagccaggagagcggtgtctacaacgcaggcaacagtgtttactatagctcagttgtttgttctagctttactgaccttgccgctacccacatcttcctatatttttgcggcagcaacaacactggctctttcagtttatccattaggcaagcgtattacccacttccctcaagttattctgggtctggcatttgcaatccccatttttatgtgctgtgccatcttaaataggccaacggatactgacgaccattccagccgtgccgtcagtgcgttatattgggtttctacgatatggactgtaatctcagacacgatatatgcccatcaggacacggatgatgacgccaaggcaggggtccgttctctggcagtgctattgggtcagcaaacaaaattgtggctttcagttttggctatcatacaagtcgccctgctggtttttatcggcgctgagtgcgactttagtttcctgtattatacattatgctgcggaggcgcggccttatccttaggggttatgttgataaaggtcgatttgaggaatcctgcttcttgcgcctggtggtttggacctggggcgagatttatgggatgttctctggtcggcggtttcttggccgagtatacctacaggaggactgggttacagtac

SEQ ID NO: 122 - DNA, 1005 bp, Artificial Sequence
  Description of Artificial Sequence: Synthetic polynucleotide
  FungalPT_122
atggcagagcgtcgtggagagaatgctgcgcttgataattctacctctcagaaaactcaagagcccatccctccactatgggtgtcatatgtaaagttaacccgtatccacaaatttccagcgggtagtatcttggtttattggccatcatcatggggcctgacgttggtagcatactctattaaattgccatccgcgtctctatgtgttcaattactgatgtaccttgtggggtgtacattgaggcacaatgccgcgtgtatatggaacgatatatgcgatagagacatcgacaagaaagtggagaggactagagggaggcctatagctagaggcttggtctctacacaggctgcaacagtattcctgcttgcgcacatcatcttgtgcgtgttgatattgtcatatgtcaacaacgggacagcgagatatgtctatttaacaaagatattaccgtccttcaaggtcggtctttttggcttgctttttgtagatatgttgtatccactgactaagagatggactaactggcctcaagcctggctagggatagccatgacctggggactgttggtagcatggatctccaatgcagggtatatgaattggtcttttatacccgttctgttcttcggcggaatatggggcttcagttggacactacattacgataccatatatgcgtgccaggatagaaaagatgatatcgtcgcgggtattagatccacggccgttctatttggggacaatgtacgtttaataagtgcggcgttttcaacgtgcttcgtcttatgtcttgcttggacaggctttatgaacagcaatgggcccgcgtactttattctatctgtgttcggcagtgcgttacattttatttggcaattatcatcactagatttcgacaacggacctgagtgctggaggatgttcaaagcgaatggtaccggactgggctttcttatcttgtctggtatgttgtgcgactacgcgcttagagtattactt

SEQ ID NO: 123 - DNA, 963 bp, Artificial Sequence
  Description of Artificial Sequence: Synthetic polynucleotide
  FungalPT_123
atggcagctacggctcaatctccaacgcagctagtaaggaccctgatagacgtgtctcgtttcgataaatataattgtttgttcgcaatcttccctggagtttggtccatatttttggctgctgccagccgtcatgccgacggagtgcatttacctagcgattgggtactggggagggcggggttagcgtttgcttatacatatctactatctggcgcgggtatggtttggaatgactggatcgaccgtgacatagatgcccaagtagccaggaccaagaatagaccgcttgcgagcggaagattagccacaagggccgccatcatatggatgcttgtgcagtatgctgcaagcgtatggctaatggacagaatgctatctggccagaacttatggacattcatgttaccattaacaaccgggatcatcttgtacccgttcggcaaacgtcctacgactagaaagttgggcatatacccacagtacatcctgggtgcttcatcagcacttactattctaccagcgtgggcctccgtatacggcgattccgtggctccgcccgacctgttagccaaatgcctaccgctgtgcgtattcttattcctatggacaatctattttaacacagcttactcttatcaggatgtcaaagacgactgcaggttatccgtgaatagctcatacgttttggcggggcagtatgtccacgggttgttactgttgcaggccgtagcggtcgtcatggttatcccttggatcttgcacgaaaatggatcagcgtggctatggttttcatggctaggggtttggactgcagccctggccgagcagctttatctttttgatacgaaagacccgagcaccggaggaagagtacacaggagaaactttgctttaggtatctggaacgtactagcgtgttttgtagaattattattagtctccggcagtttagacatgttc

SEQ ID NO: 124 - DNA, 885 bp, Artificial Sequence
  Description of Artificial Sequence: Synthetic polynucleotide
  FungalPT_124
atgacggaaaagccccagacgtttgtctctaaaagccctcccaagtggcaattatacatgcagctgtgccgtttggacgactttcctcttggtacggcgttcgttttctggccctccgcgtgggcagccacactagcagcatatagatacgcaacagcattcgatgtgttagtccttcacgttctaacgctgtttggattgtgcaccttgcttcactgcgcggggtgtgtcgtcaataacattcttgatgtagattacgacagacaagttgaacgtacgaagagtagaccccttccaagcggtagtatatctatgaggagtgcagtagctcttctggttgcgcttgtcatgggaagtctactgttcctaatactggcgtctccagatccccttgcctttagggtaggattgttttccatagtgttgttcactctatatccgctgatgaaaagatggactaactggcctcaggcttggttaggcaaatcaagcaggcatcagcttccttcatgtatgacgatgaactgctcaatattcgtcggttggacaatcatatatgacacaatttatgcttgcctggataagcatgacgacgccaaggcaggtgtaggcagcactgccctttattttggtccgagaatcagacctgctttatcattgttttccctaatgtttatagctagtttaacatacgcaggcgtcgttaacgaccagactgccatctactttgtggtttctgtaggtggtgccggacttcatcttttgtggcaactagcaacagtggactttgagtcccacaaagactgctttgacaaagttttctcaaacgtcaccctgggtttcattatatggctgggtctggtgttagattatgttgccaggagt

SEQ ID NO: 125 - DNA, 948 bp, Artificial Sequence
  Description of Artificial Sequence: Synthetic polynucleotide
  FungalPT_125
atggcaagccaggtaaacgtagagtctgggcaaggtagatccccacctccgtttccactttatttctttccggcgttcctgaggccttaccttgagttagcaagagtcgaaaagcctaacggatttgtactgatgttgtggccatatgtgtggggtttgacaatggcagcttacaaaaccaagatgcccctaaatggatactggaggagtgtgattaactgtgtcatttctgcatttatcttacgtgctagtgcatgtaccgtaaatgacatttttgacaggcgtgtggacgctgccgttgcacgtaccaagcagagacctatcccttctggacgtatatctgtctttgcagcgtgtctgtacttggtagcgttatattcagttggtatagcattcaacgctgccactcatagggggttagctctttgggttgctatattccagttgctgcccctgtttgcgatttatcctcttatgaaacgtttgatccagtggccttcagcatggttaggcttcgctatgaactttggctttcttacggcctggattgctatcaccgggtacgtggatcgtgccttattaacaacggggatggcaagttggtggtgttgggcagtgtactgtgatactatatacgcttgtcaggatatcgaggatgacgtaaaaaccggtgtcaaatcaagtgccatctttttcggtagctgggttaggtttaacctttgggtgatcgcggctgcgtttgttatattactggcagtcgcaggtgtactgaataatcaaggctggcctttcttcgctctgtcagtcggcggcacgaccacacatatcgtatggcagctaagtactgtcgatcttgaaagtcccaagtcatgttggcgtgcgtttaacagaaatggatacctgggttggcccctttgggccggtttaatgctggattatgtgttagca

SEQ ID NO: 126 - DNA, 990 bp, Artificial Sequence
  Description of Artificial Sequence: Synthetic polynucleotide
  FungalPT_126
atggccgtaattagcgaacttaggagacaccaccctaaaaccggattgttgaggtacctgccgactggggtagttccttacggagaattagtaagaatacatcgtgctttaggttactacttgaacacgtcaccctacgtggtggggatcgcctatactgccgctaccgccgaaacgaagttgcctttggacttgctacttgaccgtttacttctgctgacgctttggtcacttatcctaaggtctgccggctgcgcttggaacgatttagtagatgttgacatagacaggcaaatttctcgtacgcaaagtagacccctacctcgtggcgcaatctctctatctgctgcgaccatttttacagcgtgtctattcgtccttgggtgtagcctgttacttttccttcctcgtgagtgcctgttcgacgcgggcatcaaggttttcttcgcattgctgtacccattcggtaaaaggtttacggaccacccgcaactgattttgataaacatcgcttgggctattcctatggcgatgcacagtttggggatggagccgtcttcccagattctatctatgctgtgcatgtgtgtgttcttcagtgcggtgatcgttatgattgacctagtatactcaaggcaggatacggaagaagatttgaaggtaggagtcaaaagtatggctgtcaggtatcgtaactgcgtggagactatggcttacagtttatttgctatttcttcactagcactgctgttcggcggtgttttgggaggcctaagggtaccatttgttttattttccgtaggtggccacatcgtcggattctggaggtttttgagagcatcacttcaagcagggccagcgggggtggaaagtagggccaagtccagttgcctgattgccagtgtcttctgggttttaggattaggcatagaatacgcagaaatggtcaaagagaaagacaacccgacagataagagaaagcatccgcac

SEQ ID NO: 127 - DNA, 1227 bp, Artificial Sequence
  Description of Artificial Sequence: Synthetic polynucleotide
  FungalPT_127
atgtccagattgattgtaccaaatggaacgagattctccctaagccatagatccaccttccagaactccttgaagctatcaaagcacttacactcaataagccgtggcataagtcatcaccccaggaacacggctagtcctacgaccgccttagggtttagtaaacctagacatataatcccagtcatcagccaaccaacctcccagagagaggcccataccattgattcaagtagcagcccaacattagcggagccatatagtccgcctacctcaggtattctttcacgtataccgaaatcttgggttccttacgccgaactaatacgtattgataaacccaccggcacttactatttgtacttcccctgtcttttctccactttgatggcagcgccgcttgcgacacctatggctactccccttagcgtgttatctactgcaaccctgtttttcgccggcgctttaattatgcgtggtgctggatgtagcataaatgacttatgggataggaatcttgaccctcatgtgcagcgtaccaggcataggccacttgcaagaggtgccataactccttttcaggctttaacatatacaggtgtccagttattggcagggttaggcattctgttacaatttcctacgccgtgcttgttttatggggtcccgtccttgttgtttgtagcgtcatacccgctcgctaaaagggtgacatactacccacagttcgtattggggttaacgttttcttggggtgcggttatgggtttcccggctctaggggtagacctgctgtccaactcatcagcattgtcagcagccgcgctactatatgcttctaacgtctcctggacggtgctgtatgacatgatatacgcacatatggacatcaaggacgacgcaaaagccgggattagaagtattgcacttaggcacgacgcggacaccaaaaaggttttgaccggacttgctgtagttcagattggcttacttggcgccgccgggatggcggtgggcgccggtcccgcgttcttcatcggttcctgtggcggcgccgcccttacgctgggatggatgatcaaaagggtaaatttgaagtcagttaaggattgctggtggtggttcgttaacgggtgctggatcacaggcggtgtgatttctctgggcttgggtatagactacttatcgagatacgtgcaggacgataagacagagacatctgaagac

SEQ ID NO: 128 - DNA, 936 bp, Artificial Sequence
  Description of Artificial Sequence: Synthetic polynucleotide
  FungalPT_128
atgcccagtaggactcgtgctctgtttgaactgacacgtctgcattggttcccggtcggctgcgacttcatgttctggcccttcggctgggcctttttgagcgcagcttaccgtctggcactaccactaaatgaagtgataaaaacgacgctgttcttcgctcttttaggtattctggtacattccgcaggctgcgtaataaacgacatgctagaccgtgacttggacagaaaagtcgagcgtagtcaggggcgtcccattgcgtcaggggttgtgactagaacagaggccagcgtccttctagtagtcctggtcgctgcgttgttctacttattcagtacttgcggaacaaaggcctttacattaggcgtggtagccctaccgatatgtattactacttacccactaatgaaaaggtggatgaattggcccagtctatttctgggattctcctcttcatgggctgttccgggcacatgggtagctaccaccggacattacaactggggtattatattgaacatagctattgcttcttgttgttggaattgtatatatgacaccatctacgcctgccaggacaaaaaggatgatgaaaaggcgggcgttagaagtatggctgtccacttggggcgtgcaattaggccagtgttaactttatttgacgcgacgttctttgtatgtctgctgtgggcgggttatttaaacgaccaaggcctaccgttttacctaatgagcgtcctagcaccgttcttattatgcctatggcacatttggtcatttgaccacaacgatccaagggactgctggaagttcttcaccgcaggcagacatgggggcgctatggtgtgcgttggactaatagtggatctgtactttaaaccatctagcccggctgggggaaggtacaactttattcacttctttcgtgcgtta

SEQ ID NO: 129 - DNA, 486 bp, Artificial Sequence
  Description of Artificial Sequence: Synthetic polynucleotide
  FungalPT_129
atgttggataaggaccccctggcaccgttgttagaccaaagcagcctagacctgtcaacgggggttagtaaagtcctaggggcccccttagcccagagtgcagcttgcctatacttcgctggtattatttggacagtgattttcgatacgatctatgcacatcaagattatacggatgatcttaaagcgggcgtcaggggtctggcggtcagacttggtagacgtggcacgaaaccagcatgttatattgccacagccgtccaagtctactttcttgtagcagcaggccaacttgctggcttcggagtgtcttactatgcgatttcctgtggcgtcaccgctttgctattaactagaatgatttgggtagttgacctagaggacgggaactcatgtgcgtgggcctttggaccggggtcaagttatgtaggtacggcgatttttgcagggctattagtagaatttttcgccaagaaacatggttat

SEQ ID NO: 130 - DNA, 1215 bp, Artificial Sequence
  Description of Artificial Sequence: Synthetic polynucleotide
  FungalPT_130
atgaatgactccataactccaaactcccaaagaaatatgcccagaggaatatgggagttagctaggcttcacacaagagaagcgtggttgtgctggtacccagcaatatggggtgcctgtgtagcggctggcatgcgtaatacgtctctggaactagcgccgtttctaaggcttatttttggtatttgggcatccgttacctcaacacactgcgcattctgcacctttaatgatctgtgcgatcaaaagctagataaacacgtggaacgttgcaaagttaggccgttacctgcgggtatgataaccacatccgaagggatcttagctttcatttgttggctacctatcaccctagcagttacatggtcaacactaggaccagtcgtaacagcgggctttattccagtctgggtcctatcaaccatatacccattcatgaaaaggattatgcccttcccccaagtaatcttaggggcgatcataggaggcgccgtttttccagggtgggtgggtattactggtgacctagagaatcttgacgaagccttacccctgttcctggctacagcatcttgggtcgtatactttgatttgttctatgccacacaagatcgtcctgacgacgagaagattggggtcaaatccctgccagtgctgatgggcaagaatgttcagattctgctcgcagctctaggcatattacaagtgctattgttcgcaattacagcactatgggctgatatgtctcttattttctgggtactgggcctgggtgtctggatggtctctgtaccttggcatattagctccttagacctgaaagatagacacagcgggggccgtgtatttaggagcaatataaagctaggattgtaccttacagttgtgtttatccatccgaccaatacaacccccgatgcacgttcccgtccagggatggcgaacagtaagctaccgcaaccaatagtagcatacccgagagagacaggtcgtaccgcggtggacctaattctgtctggcacgatatcgaaaaattctgatgtgaagattctgctgagccacgtgggtggcacgcaacccattcgtgccacacgtgcagctataatcttatatgatacaggactaataaaactgtcacctgagacatttctggaacaggcgagagatttctacagggacttagcattgccggggaacgaggggaacttggaactg

SEQ ID NO: 131 - DNA, 1005 bp, Artificial Sequence
  Description of Artificial Sequence: Synthetic polynucleotide
  FungalPT_131
atgggaaggtcaagctcaacaaaacacgatgagacgacccctctacttcctccgaggagatccacagatgcgccaagcccgaagagctttttaggtctgttttcccctaatgtacgtccgtacttggaaataatcaggctggataagcaaaccggtacaaagctgatgtttttccctttcgcatggggacttactatggcggcctacagagtcgagttgcccttaaaacagtactgggtagagcttttaaagtatttgttcggagctttcattcttagggcgtcagcagtaaccataaatgatatatttgatcgtgacgttgacgctaaggttgaaaggaccaaacttagacccttaccgagtggcaggattagcgtatttgcagcaagcgtatatttaatcatacagtatatcattggaatttgttttctatacttcactcgtcacggcttagctttttacgtagccctttttcagtttcttccgctatttgcgatctacccgttactaaaaagatttacgcactggccccaagcctggcttggactagccatgaatttcgggtttatcacgtcctggattgccacaaccgactccatagaaccatacttatttgttacgataatgacggcttgctggtgctggacagtcatgtacgacactatttacgcctgccaggacattaaagatgatataaagtctggggtccactctacagcaatattatttggatcttggattaaaatcattttgaagttactggccgtgacatttgtagcaatgcttggaattgccggctatttgaaccatcagggtccctttttctttactctaagcgtaggcggcaccgcgctacaattagtatggcgtttcagtaccctggatctggaaaacaacgaacactgttggcgtgacttcaatagaaacgggcaggtttgttacctggtatggtttgggttgtttgccgactacttgacgaaaacaggtattcttaatttcctgctg

SEQ ID NO: 132 - DNA, 960 bp, Artificial Sequence
  Description of Artificial Sequence: Synthetic polynucleotide
  FungalPT_132
atgccgcccgcagtcgtgcgtaacagtgcttacacaccgcctaccaaaggtatcctatcatgtttaccttccagctgggtgccatatgccgagctaattaggttggataaaccgcatggaatatacatgacaatttatccctatgcgcttggcctgctatacgcttcgcagttgacatctgaaagtctgccacccaatgttgttttatcaagatttcttaacctggcaatctggacattcctaataaggtcagcgggctgcgcctggaatgacaatgtagaccaagactttgatcgtcagacggcacgttgcagggacagacccatcgccagaggcgcgataagtacattacagggtcacgtctttaccactgccctgcttgcgctaggttttctatctatacagaatttccccctggaatccaaaatcgacggtgctgcaacggttttgttaacctgtatctaccccttcgggaaaaggttcactcatttcgcacaagtaactcttggccttacccttagcgtcgctataatcttcggaccccacagtgtaggggcgaacccattgtcacaagggaactttctacctacaacttgtcttgtctcttcaataatacttctggtcatattctacgacgtggtatatgcaaggcaagacaccgtggatgatctaaaaagtggggtcaaagggatggcagtcttgtttaggaattggattactacgttactactaacactaatcattgctattctgacgctactgtacattacggcgagaagtcttgatctgggctgggtctttttcggccttagcgtcgcaggccccgccgtgagtttgctgacgacgatagctttgatcgcttccaggagcagtagtagcaggtatgcaggaaagttctacgttttggcaattgcatccctactgtctggttttactatcgaatacctgagaacgataatg

SEQ ID NO: 133 - DNA, 1005 bp, Artificial Sequence
  Description of Artificial Sequence: Synthetic polynucleotide
  FungalPT_133
atggccgttcgtccatctaggaacgtgagaatggcagctaaaggtccactgcctggtgacgattacatgcctcctacctcaggcatattaagtaaactacccgcttcttgggtcccatacgcacaattgataaggcttgagcagcctcatggaatttatatgatcttctttccgcacgtagtagggttaatgtacgcctgcagtgctagacctaccgcagtcccagcgtccatgcttgcaaaccgtttaggtgtgttctttgcctggacgttctttatgaggggagccggctgtgcgtggaacgataatgttgatcaggacttcgaccgtaagaccgctagatgcaagaacagacccatcgctaggggagcaatatcaacgagtcaaggccatatcttcacgctattcttaactattattggcttcctgttcttgagaccgcttccctggcagtgtacgttgtgcggattagctacgagcgtgttggcaattatctacccgtttggaaaaaggttcactaattttgcccaagttattttaggatcttgcttagcgagcactatagcattgtctgcttatgctgtcgagttaccggctttatctccgccttatctagtcccaacactgtgtttgactagcacaataatcttactggtcgtgttctatgacactatatatgcaagacaagacacagccgatgatttaaagagcggcgtgaaaggcatggcggttttgttcagaaaccacatagaactacttttaggcgtgctgacttgctctatcgctggtttacttgccactacgggtacgattcttgatatgggaccctacttctttgcattttccgtcgtaggactgacgacgggactacttaccatgatcgcactaatcaggtggcacctgctacccagttttgccaaatacagcgggtggttttacgccttggcaatcgccaacctgctaggtggctgcatttgtgaatatttagggaaagcgccagcacta

SEQ ID NO: 134 - DNA, 900 bp, Artificial Sequence
  Description of Artificial Sequence: Synthetic polynucleotide
  FungalPT_134
atgccttctaggacaagggctctgtttgaactgactcgtttacattggttccctgtggggtgtgattttatgttttggccctttggatgggcctttttgtcagcagcttacaggttggcactgccggttaatgaggttgtcaaaaatatccttttcttcgccttgctggggatattggttcattctgcaggctgtgtgttgaatgacatgctggatagggatctggatagaaaagtggaaaggtcccaggggcgtcctattgcctctggcgttgttacacgtacagaggcatccgccctgttggttgttttggtggctgcgttattctacctattctccacttgcggcactaaggcgtttacactaggagtcgttgcctttcccgtttgtattgcgacgtatccactaatgaagcgttggatgaactggccttctctattcttaggtttcagcagttcctgggcagtaccgggcacgtgggttgcaactaccgaccactacgattggggtattattcttaatatagcaatagcgtcatgctgttggaattgtatttatgatacaatctatgcgtgccaagacaaaaaggacgatgagaaagccggtgtcagaagtatggcggttcatctgggtaaggcaattagacctgtgcttacattattcgacacgacctttttcgtttgtctgttgtgggctggttatttaaacgaccaaggcctacctttttatatgatgagtgcattggcaccatttctgctgtgtctttggcatatctggtcattcgaccaaaacgatccgcgtgattgctggaagaactttacggctggcaggcatggaggaacgatggtgtgcgtagggttaatagtcgattactgctttaaactgagtttccctgccgga

SEQ ID NO: 135 - DNA, 960 bp, Artificial Sequence
  Description of Artificial Sequence: Synthetic polynucleotide
  FungalPT_135
atgccaccaagcagggcgcgtgcctccacttacaccccaccgacaaaaggcattctgagttacctgcccagtagttgggtaccctatagcgaactgataagactagataaacctcatgggatatacatgaccatctatccgtatatattaggtttattttacgcgggtcagataactcccgcacctatacacctgaactttctgttatcaagatttttaaatttagctatctggacgtttttgattagatctgcggggtgtgcttggaatgacaacgtcgatcaagattttgaccgtcaaacagcgagatgtagagacagacctattgccaggggcgccatcagtactttacaaggccacgtcttcaccacggccctagtggcgcttggattcttgtctatccaggattttccgctggaaagcaaaatcgacggggcggctacagtattacttacgtgtatctacccttttggtaaacgtttcactcacttcgcgcaagtaaccttgggaagcacactatcagtgtctattgtatttggccctcacgcagtcggcgcgaatccattgtcaagcgaaaatttcttacccaccgcgtgtctagtctcatctataataatgctagtaatcttctatgacgtggtgtatgctcgtcaagatacggctgacgaccttaaaagcggggttaaaggaatggcagtactatttagaaattggatcactacactattgctatctttaattaccgcgattacgactctattatatatcacgggaaaatccctaggactaagtccactgttctttggattgagtgttgcaggtcctgccatatctcttctgaccatgattgtgctaatagcgtccagatcctcatctagcaggtacgctgggaaattttatgtcctggctatctttagtctgttaagtggctttgcggtggaatactcaagaaccattatg

SEQ ID NO: 136 - protein, 341 aa, Artificial Sequence
  Description of Artificial Sequence: Synthetic polypeptide
  FungalPT_1
MDEVKGYNKPSHGLFRFIPDAWVPYAELMRLDRQSGFWAFYWHYLIGLGFAINIPPFSSEIDLKALVLLAAYLGLWTTVFRGITCTWNDNLDQDFDRQVARCRVRPIPRGAVTTGQAHFFTAMQIAVGTCILYPFSDSTLIHATVDGVLLFIYPLLKRCTNYPQVELGFGLSYAIFLVTAMVGKDPLRPLLDPSLDLSARVAKVIEAPLAQSAACLYVAGIIWTIIFDTIYAHQDYVDDLKAGVRGLAVRLGRRGTKPACYIATAVQLYFLVLAGQLAGFGASYYAISCGVTALLLTRMIWVVDLEDGDSCAWAFGPGSGYVGTAISAGFLADFFSKKYGY

SEQ ID NO: 137 - protein, 325 aa, Artificial Sequence
  Description of Artificial Sequence: Synthetic polypeptide
  FungalPT_2
MAPRTSTAQGRYTPPTKGILSKLPASWVPYAELIRLEQPHGIYMIYFPHIVGLMYACSARPSAVPAHELAHRLVVFFVWTFFMRGAGCAWNDITDQDFDRKTERCRNRPVARGAISTTQGHIYTLVLTALGFLTLQTLPVECTLCALATAVLTIIYPFGKRFTNFAQVILGSTLASTIALSAYAVELPALSPGYVVPTLCLTATILLLVVFYDTIYARQDTADDLKTGVKGMAVLFRNHIETLLAVLALSIAGLLATTGTLLNMGPYFFAFSVVGLATGLLTMIALIRWHLFPSFAKYSGWFYALAIVNLLGGCVVEYLNKAPAL

SEQ ID NO: 138 - protein, 322 aa, Artificial Sequence
  Description of Artificial Sequence: Synthetic polypeptide
  FungalPT_3
MVSSRAGETQPLVWGISGRGGNTSTRPSGFSLKEYWRLARMHKFPFGSILIFWPAAWGYLLGAQAAKPGPIELTVTLAALLLWSTILHSAGCVVNDLCDVEFDRQVERTKHRPLAAGTVSIFGAWVFMLLQVVALGLLLTFVNRNAVISGVFNIFPLAALYPLMKRITWWPQAWLGLAMNWGLPTAWLMASPNDYKSSPLWVLMFGIFCWTIFYDTIYACQDRKDDINAGVRSTALLFGDYVKPILAIFGAIFVATLAYAGQALNLGAEFFIISVGGCAVHLTWQLVTLDVENPKDCGARFVANGDLGYIVTAGMLATWFLH

SEQ ID NO: 139 - protein, 296 aa, Artificial Sequence
  Description of Artificial Sequence: Synthetic polypeptide
  FungalPT_4
MRQPWWLGYWQLARMHKFPAGSILVFWPFTWGYVLGAHEKRPEPLQLVYIMAAFLIGSTLLHCAACTINDICDVNFDRQVERCKTRPLVAGTVSMPGAWIFFFLQIAVLFGMLSFVNKNAFLAGTFGIFPLTTVYPLMKRITWWPQAWLGLAMNWGLPTAWLIAAPQDVKSVPMWTLTFGTLCWTIVYDTIYACQDRKDDVKAGVRSTAVLFGNYVKPILSLFAAAFVAALAYAGYETHQGWIYYAVSVGGCAAHLLWQLVTVDLDVPEQCWQKFQSNGNLGYIVLGGMLGEWYLY

SEQ ID NO: 140 - protein, 332 aa, Artificial Sequence
  Description of Artificial Sequence: Synthetic polypeptide
  FungalPT_5
MSTTRRSVTTRPSTSSRNVPRGIWELARLHTRESWLCWYPSIWGACVAAGVSDTVLEPLAFARFLFGIWASVTATHCAFCTFKSVPFCFFVVPRYSSDYWHLDKHVQRCKVRPLPSGMISTPEALLAFVCWVPFTFAITWATLGPAVTVSFIPVWVLSVIYPFMKRLMPFPQVVLGAIIGGAVFPGWVGVTGDLDHLDQALPLFFATAAWVVYFDVFYATQDLPDDKKAGVRSLAVWMGPNVKILLAGLGILQIAFFAMTALRADLSLIFWILGIGVWAVSVPWHVLSLNLKDRHSGGSVFKANIKLGLYMTGVSLLELVLLRVHHAPMRVY

SEQ ID NO: 141 - protein, 244 aa, Artificial Sequence
  Description of Artificial Sequence: Synthetic polypeptide
  FungalPT_6
MAPQARNQKSQHNLVKGIWQLMRLHTIEGLSTASIGWLALFFYAIQQQVSWEVLKNVFLGLFASYGITHGIFCMWNDICDRNFDGQVARTKQRPLPSGMVTLTEAIIAFILGFAGTISITYHLLGEDTTRAMVPAWVLSFIYPLCKRAIWAPQVVLGLTMAACVLPPWVALGNDYTGNITLPASLFGAIFSWLVYLDLIYASQDSVDDKKAGVRSLAVFLGDNLKGGLTVLGVAQIVCFVLADR

SEQ ID NO: 142 - protein, 318 aa, Artificial Sequence
  Description of Artificial Sequence: Synthetic polypeptide
  FungalPT_7
MSSSLAGENQTLVAGKVYVPAQPSSFSFQAYWQLARMHEFPAGSILIFWPAAWGYLLGAHAAKPGHIQLASTLAGLFVWSTLLHSAGCVLNDICDVDFDRQVERTKKRPLAAGRVSLFGAWVFFLIQMVALVAMLTFVNHNALISGAFGIFPLATLYPLMKRITWWPQAWLGLAMNWTLPTAWLIASPNDYKSSPMWVLTFGTLCWTIFYDTIYACQDRKDDMKAGVRSTALLFGSYVKEILSVFGAMFVITLAYAGQAVQLGPEFFVISVGGCTVHLIWQLVTLDVEIPKNCGRRFVANGDLGYIIVTGMLVDWYLH

SEQ ID NO: 143 - protein, 332 aa, Artificial Sequence
  Description of Artificial Sequence: Synthetic polypeptide
  FungalPT_8
MSSSFRIGFDSNPKTKGGLFVDVAPRKGILAYLPESWVPYAELIRLEKPIGFAIVYLPYVMGILYGACIAPEPLPVSALLYRARVFLLWSLVLRGAGCAYDDIVDQDLDRQVDRCRTRPIPRGAITTTQGWLFTTGLSLVGFFSLSLLPWECTIDAGIITLLSLIYPFMKRFTNYTQVVLGLAIGFAIIMAAHSFDVDPLARSTYVPTLCLWFAVGFLMMLYDIIYARQDTKDDVKAGVRSMAVRYRHHVKAVTSLLAFAVAGLLATTGIYTGMGPMYYLIAVGGTCSSLWAMIGLMDLESPSNYPRFCAGAYVLTSISVIGGFTAEYMENS

SEQ ID NO: 144 - protein, 334 aa, Artificial Sequence
  Description of Artificial Sequence: Synthetic polypeptide
  FungalPT_9
MGQNFDVETTLLIAHKAPSRPCIKFPLGHAPVHVRPYLELIRLEKPTGTILMFWPFAWGLTMAAFRTGLPLERYGFDLAKCFIGAFLLRSSACTINDIFDREMDAGVERTKGRPLASGRMSVLGATVYLLVQYILGILFFFVTVHNLAFWVALFQLLPLFSIYPLLKRVTHWPQAWLGFAMNFGFITGWVSVTGSLNTAVLSVAMAGCWCWTMLYDTIYACQDIKDDVKMGVRSTAILWGSWIKPLLVLCGIGFVAMLSAAGYFNDQGLSYFIVSVGGTIAHLVWQFMIVDLSVPASCWENFNRNGQLGWIVWGGLFVDYLVAGDLFPVYRALF

SEQ ID NO: 145 - protein, 326 aa, Artificial Sequence
  Description of Artificial Sequence: Synthetic polypeptide
  FungalPT_10
MAPTDATPLVKRNAERLPFPLGLVSPGVRPYLELIRFHKPTGTILMFWPFAWGLTLAAYRTELPLNRYWVELAKSLFAAFIVRGSACTINDIFDREFDAGVERTKGRPLASGRVSVFAAVVYLIIQYIIGIMVYVSYNDIALYAAILQLLPLFLIYPLMKRITYWPQAWLGICMNFGLVVAWAAVTGGLDTQLLAVLMAGTWGWTMHYDTIYACQDRRDDIKVGVKSTAVMLGDYVRPFCFVLSMMFIGTLYYAGILNHQTPYYFWISVGGTALHILYQYATVDLDSPDSCGLNFIRNGHLGWITWAGMMVDYLVKIDQLPVRLPF

SEQ ID NO: 146 - protein, 319 aa, Artificial Sequence
  Description of Artificial Sequence: Synthetic polypeptide
  FungalPT_11
MPSRARSLVELTRIHWFPVGSDFMFWPFAWGSLAASYHVALPMNEVIMNTLFYALLGTLVHSAGCVINDMLDRDFDRKVERSKGRPIASGAVTMTEASVLLFVLVAAIFYMFSTAGPTALTLGLVGLPACGGTYPLMKRWMYWPSLYLGFAASWAVPFTWVAITGQFDWGMILNVAVASCCWTCLYDTIYACQDKKDDEKAGVRSMAVRLGDGIRLALSVFDVIFFACLLWAGYLNDQHLPFYVMSVIAPFLLCLWHIWSFDHNDPKDSWEKFTAGRHGAALVCAGLVVDHYLQSCVSSHLSIHFHLELDSWWCRQRSC

SEQ ID NO: 147 - protein, 267 aa, Artificial Sequence
  Description of Artificial Sequence: Synthetic polypeptide
  FungalPT_12
MATPPTKGILSCLPSSWVPYAELIRLDKPHGIYMTIYPYALGLLYASQLTSESLPPNVVLSRFLNLAIWTFLIRSAGCAWNDNVDQDFDRQTARCRDRPIARGAISTLQGHVFTTALLALGFLSIQNFPLESKIDGAATVLLTCIYPFGKRFTHFAQVTLGLTLSVAIIFGPHSVGANPLSQGNFLPTTCLVSSIILLVIFYDVVYARQDTVDDLKSGVKGMAVLFRNWITTLLLTLIIAILTLLYITARSLDLGWVFFGLSVAGPA

SEQ ID NO: 148 - protein, 334 aa, Artificial Sequence
  Description of Artificial Sequence: Synthetic polypeptide
  FungalPT_13
MAPATRTPIHPEAAAYTNPRYESGPLSAIPKSWVPYFELMRFELPHGYYLGYFPHLVGIMYGASAGPERLPASQLLFQALLYVGWTFCMRGAGCAWNDNIDQDFDRKTERCRTRPIARGAVSTTAGHIFAISFVAAAFLCLAPLPTECHQLGVIVTVLSIIYPFCKRFTNFAQVILGFTLAANFILAAYGAGLPALEQPYTRPTACVTLAITLLVVFYDVVYARQDTADDLKSGVKGMAVLFRNHIEILLAGLTCTIGGLLAVTGIYVENGPYYFVFSVAGLTVALLAMIGGIRYRVFHSWNSYSGWFYVIAIINLMSGYFIEYLGNAPLLARA

SEQ ID NO: 149 - protein, 187 aa, Artificial Sequence
  Description of Artificial Sequence: Synthetic polypeptide
  FungalPT_14
MPSQTRALFEFTKLHWFPVGCDFMFWPFGWAFLSATYRLALPVDEVIRTTSFFALLAILVHSAGCVLNDMLDCDLDRKVERSRGRPIASGVVSTTRASMLLSILITALFYLFSTCGTKAFTLGVVAFPVCIATYLLMKRWTNWPSLFLGFASSWAVPGTWVAMTDNYIRESLPPEIEVMCSKFLVFL

SEQ ID NO: 150 - protein, 365 aa, Artificial Sequence
  Description of Artificial Sequence: Synthetic polypeptide
  FungalPT_15
MALTLRNSSYQQAALHTSTERLTTAATQEVPEPPASPEAVYSPPKTGIISYLPASWVPYAELTRMDKPAGTYYLFFPCLWSTLMAAPMVAPMASPVSVIGTSLLFFSGAFIMRSAGCSINDLWDRKLDPHVTRTKFRPIARGALTPFQGLAFTGAQLLAGLGILLQFPTSCLFYGIPSLLLVASYPLAKRITYYPQAVLGLTFSWGAMMGFPALGIDLLSNSAALTAAACLYSSNVAWTVLYDMIYAHMDIKDDAKAGIRSIALRHDAETKQVLTGLAAVQLSLLSAAGFAAGAGPAFFIGSVGGAAVTLGVMIKRVKLKSVKDCWWWFVNGCWITGGVVSLGLAADYTVRYIQDGEEDVKTQEQ

SEQ ID NO: 151 - protein, 421 aa, Artificial Sequence
  Description of Artificial Sequence: Synthetic polypeptide
  FungalPT_16
MPFINSASRNVIFRLPSGCRSSVVRTAFRCQRVQENFTSAFNKNAPKCTPVSNQQAIYSTLQSRHFHQSPNRPLVAAPQTTSPLSPEPESQPPAAYAAPRTGLLSILPASWVPYAELVRLDKPTGTYYLFFPCLFSTLLAAPLAVPMASPLSVLGTSLLFFSGALIMRGAGCTINDLWDRNLDPHVRRTRLRPIARGAVTPFNALAFTGVQLFTGLGILLQFPTQCLFYGIPSLLFVASYPLAKRVTHYPQFVLGLTFSWGAMMGFPALGVDLLQNSAALTAAGFLYASNVAWTVLYDMIYAHMDIKDDAKAGIRSIALRHDAQTKQILSGLAVTQIGLLAAAGVAAGAGPVFFVGSCGGAAVTLAVMIKKVNLKSVKDCWWWFVNGCWLTGGVISAGLGAEYLMQYSQSSEVEAGMGRAV

SEQ ID NO: 152 - protein, 329 aa, Artificial Sequence
  Description of Artificial Sequence: Synthetic polypeptide
  FungalPT_17
MSPRVSSMPYTNPRYESGPLSLIPKSIVPYFELMRFELPHGYYLGYFPHLVGIMYGASAGPERLPARDLVFQALLYVGWTFAMRGAGCAWNDNIDQDFDRKTERCRTRPIARGAVSTTAGHIFAVAGVALAFLCLSPLPTECHQLGVLVTVLSVIYPFCKRFTNFAQVILGMTLAANFILAAYGAGLPALEQPYTRPTMFATLAITLLVVFYDVVYARQDTADDLKSGVKGMAVLFRNHIEVLLAVLTCTIGGLLAATGVSVGNGPYYFLFSVAGLTVALLAMIGGIRYRIFHTWNGYSGWFYVLAIINLMSGYFIEYLDNAPILARGS

SEQ ID NO: 153 - protein, 354 aa, Artificial Sequence
  Description of Artificial Sequence: Synthetic polypeptide
  FungalPT_18
MNANTCIQEVLGPNLVLTNATPKYASLPCSRYTTPKTGLFAIMPQSWIPYAELMRLDRPAGYWAFYWHFAIGLTLAASISSPTPSPLTLVSRFLFFAVWVVVLRGAVCTWNDTLDQDFDRRVSRTRNRPIPRGAVSTVQSHLFTLAQIAVGAALLLPLPRGCMHHAALMTAILLVYPLGKRVTDFPQVILGIAFGMPIFLCGAALDADPLPLSDLHRFGTETDDVRLVAALCFCIGSILWTVIFDTVYAHQDAKDDVKAGVRSLAVRLGDRTKQVLSVLAATQVIFLLAAGVACKFSTIYFAASCVGTAISLAAMLWFVDLRHSASCAWWFCPGSHLVGASIVAGLLGEYCFNS

SEQ ID NO: 154 - protein, 261 aa, Artificial Sequence
  Description of Artificial Sequence: Synthetic polypeptide
  FungalPT_19
MPSRARSLFELTRLHWFPVGSDLIFWPFGWGFLSAAYRVGLPMNEVVKDFLFYAFLGTLVHSAGCVINDMLDRDFDCKVERSKGRPIASGAVSRSEASVLLVVLVAAIYYMFSTAGTAAFILGVVGLPVCGGAYPLMKRWIYWPSLFLGFACSWAVPFTWVATTGQFNWYIILTIAIASCCWTCLYDTIYACQDRKDDEMAGVKSMAVSLGEGIRPALSLFDLTFFGCLSVGWVLERPAPPVLCDKCHCAVRPLSLAHMVL

SEQ ID NO: 155 - protein, 333 aa, Artificial Sequence
  Description of Artificial Sequence: Synthetic polypeptide
  FungalPT_20
MVNKTELSSLSEEGGYTPPQRGLLSLLPSSWVPYAELIRIDKPHGIYLVWVPHIVGLAYASAIGPSPAPVRRLCTRALRLMVWAALCRSAGCVWNDTVDQDFDRKTVRCRNRPVARGAVTTSQAHIFAAVLFSLAFLSLRGISSNAMSVAGIVAVLSLVYPFCKRFTSFPQVVLGSSLGLTVVLSAWSLDVDMLEGRNRIPTICLMLVIVLLIVFYDVVYATQDTADDVKAGVRGMAVLFRNHLLVLLCTLVCGIAGVLSTLGILVNMGPQYFVFSVAGLVLGLMVVVGLIYLPFLSRWRRLSGWVFGFAFASFIGGFSSEHYRRLSLAAQRG

SEQ ID NO: 156 - protein, 304 aa, Artificial Sequence
  Description of Artificial Sequence: Synthetic polypeptide
  FungalPT_21
MRAPPTQSVAQSWWRPYWELARMHKFPTGSMLVFWPCVWGYLMSAGSNIPPWHRLPALFAMFLVGSTILHSAACTINDICDRDFDRQVERTKNRPLAAGTISVLGATIFLILQVAVFFYILSRVNSTAFLCGTFGVFPLHAFYPLMKRITYWPQAWLGLAMNWGLPTAWLIVAPGDIKSVPMYTLTFGTFCWTIVYDTIYACQDRRDDVKAGVRSTALLFADWVKPILTVFATVFVATLTYAGMSTGRGWTYFALSVGGCAAHLVWQLLTLDVDSPEDCWSKFNSNGYLGYIVTIGLLVDSLRV

SEQ ID NO: 157 - protein, 332 aa, Artificial Sequence
  Description of Artificial Sequence: Synthetic polypeptide
  FungalPT_22
MAPSSERAPLVRRNARPAEPEKLPFPLGLVSPGVRPYLELIRFHKPTGTILMFWPFAWGLTMAAYHVDLPLNRYWIELAKSLFAAFIVRGSACTINDIFDRNFDAGVERTKGRPLASGRVSVFAAVVYLILQYIAGLVVYVSYNDIALYAAVLQLLPLFLVYPLMKRITYWPQAWLGICMNFGIVIAWAAVTGSLATELLTVLMVGTWGWTMHYDTIYACQDRRDDIKVGVKSTAVMLGDYVRPFCFALSVMFIATLYYAGILNNQTPYYFYISVGGTALHILWQYATVDLDSPDSCGLNFIRNGHMGWITWAGLMIDYLVKIDQLPFRMPF

SEQ ID NO: 158 - protein, 328 aa, Artificial Sequence
  Description of Artificial Sequence: Synthetic polypeptide
  FungalPT_23
MATSSERSPLIRSHVPEKLPFPLGLVSPGVRPYLELIRFHKPTGTILMFWPFAWGLTMAAYRMSLDLTTFWTEMFKFLIAAFIVRGSACTINDIFDRDFDAGVERTKGRPLASGRVSVSAAVIYLILQYIAGVLLYMPYKGVAFWAAITQLLPLFIIYPLMKRITYWPQAWLGIAMNFGLVISWVAISNKVDVQLLTLLMVGSWGWTMHYDTIYACQDRKDDVKVGVKSTAVMLGNFVRPFTFSCAVLFVSTFAYAGILNEQTPYFFYVTIGGTSLQLIWQYVTVDLDSPDSCGLTFIRNGHMGWVTWAGLMLDYLVKIDKVPFALPF

SEQ ID NO: 159 - protein, 334 aa, Artificial Sequence
  Description of Artificial Sequence: Synthetic polypeptide
  FungalPT_24
MINIATRRARGASSQESKDYLSKQYGGVHSEGWVNRLPSSWIAYVQLSRLSPPAAFFLILFPHLFGVILAANTLKVPATEVARACLLLFGGSFFCSNASHAWNDLVDAPIDKAIARTKTRPIPRGAITPLAAFIFAVSQATGALSFLYFLPADTAKVATPTIIGTIYYPFAKRHTNLPQLVLGFCLSWGIMVGSSAVGVTKPWTDPSTVFLLVASILWVILFDTIYAHQDLADDVKMGVKSIAVLFRHHAKALLWALFLGMIASLLASGYHGQLGILYYAVTVVGCILSVGTMVVKVDLKSPASCWLWFSQGFWLTGLAIFGGLFADYCGNGGR

SEQ ID NO: 160 - protein, 358 aa, Artificial Sequence
  Description of Artificial Sequence: Synthetic polypeptide
  FungalPT_25
MHPTMKANTSIQEVMGPNLVLANTTPECDSLPSSRYTTPKSGLFAIMPQSWIPYAELMRLDRPAGYWAFYWHFAIGLALAASMSSPIPSPLTLISLFLFFAVWVIVLRGAVCSWNDTLDQSFDRNVSRTRNRPIPRGAVSTVQGHLFTLAQIALGTAMLLPLPRGCMCHAALMTAILLVYPLGKRVTDFPQVILGIAFGMPIFLCGAALDADSLPLSDLYRLGTETDVLRLVAALCFYIASILWTIIFDTIYAHQDARDDAKVGVRSLAVRLGDRTKQALSVLAATQVMLLLAAGVACNFSAIYFAGSCVGTAISLAALLWFVDLRHSASCAWWFCPGSHLVGASIIVGLLGEYCVNS

SEQ ID NO: 161 - protein, 334 aa, Artificial Sequence
  Description of Artificial Sequence: Synthetic polypeptide
  FungalPT_26
MARARDRTASDRAPLVREAVQYTAPTKGILSKVPASWVPYGELIRIHQPHGIYLSYFPHLVGLMYASAVRDVVVAPPTLGRCAVVLLVWTVFWRSTGCAWNDNIDQEFDRKTTRCRNRPIARGAVSTTNGHVFALVLSLIAFGSLRLLPPECTFVGLASLALGLIYPFGKRFTNYPQVILGSTLGSTVALSAYSVGLPALSPPHLGPTLCLSATVTLLVVFYDVVYARQDTADDLKSGVKGMAVRFRNHIGGLLAVLVVSITGLLTTAGIMIGARQSYYLFSVAGLASGLVSLAASTRWDLLHGWAASSGWCYALAIASLVGGLASEYVLYRLN

SEQ ID NO: 162 - protein, 316 aa, Artificial Sequence
  Description of Artificial Sequence: Synthetic polypeptide
  FungalPT_27
MPTRGDYQPPKDGILSKLPESAVPYGELLRIHRPLGYYLNISPYVVGVAYTAAISPVTLPSTFLLGRLVILSLWGFCIRSAGCAWNDLIDMDIDRQVSRTKLRPLPRGAVSPSGAALLAAFMFGCGGSLLLLLPSQCAFEAAIVVFFALLYPFGKRFSDHPQLILTNIAWAIPMAMSSLDMSPLDFPIPTLAMSFSIASVIVMIDIVYACQDAEEDKKVGARSMAVRYMEITDQIAYGLFFSGTLSLLVGGILRGLGFPFLIFSVGGHFLGFLRFLRASLGRGARSALVESQAKSSCLLATMLLVFGLCFEYCVRL

SEQ ID NO: 163 - protein, 331 aa, Artificial Sequence
  Description of Artificial Sequence: Synthetic polypeptide
  FungalPT_28
MSPSQEYEPLMKHDSVVPKPQRLAFPLGLVPEAVRPYLELIRFHRPIGSILMCWPFVWGLTMAAYHTELPLHRYWPELARSVFAGFIVRSSACTINDIADREYDAGVERTKNRPLASGRISVFAAYVYLVAQYIVGILLYLSYNDLAFYTALLQLLPLFIVYPFMKRVTYWPQAWLGICMNFGVIVAWASITGALDWKLLGALMVGFWGWTMHYDTIYACQDRKDDVKVGVKSTAVMLGDHVRPFTALCATLFVAMLAVGGVLNQQTPVYFVVSVGGTALQLIWQYAKVDLDSPDSCGLTFIRNGDMGWITWAGLMLDYLVKIDALPFLRA

SEQ ID NO: 164 - protein, 345 aa, Artificial Sequence
  Description of Artificial Sequence: Synthetic polypeptide
  FungalPT_29
MRLFNTPSTESLLPTVYEKKHVPAPAATVLKFPLSISPELLHPYMELIRLEKVTTGTKLMFWPYAWGLTMAVYSSNPTMPLSQYSCQLLQCLVAAFVMRSSACTINDIFDRKMDASVERCKTRPLASGRISVLAASIYLAIQYLLGLAFFYFTLEGLALYVAVFQLVPLFAIYPLLKRVTYWPQAWLGFAMNFGFISAWVSIADSFDYYILGCALVGCWCWTMLYDTIYACQDIADDLKAGVHSTAILFGTWIRPLLIGCACVFVSGLYAVGRLNGQGMGFFIVSVGGTTLHLVWQFSTVRLDFPQSCWTNFNRNGELGWIVWGGLMIDYLVVSGSLTPLFHLLS

SEQ ID NO: 165 - protein, 307 aa, Artificial Sequence
  Description of Artificial Sequence: Synthetic polypeptide
  FungalPT_30
MPSQTRALFELTRLHWFPVGCDFMFWPFGWAFLSVAYRLALPVNEVIKTTLFFALLGILVHSAGCVLNDMLDCDLDRKIERSRGRPIASGVVSRTRASMLLAALIAPLFYLFSTCGTKAFTLGVVAFPVCIVTYPLMKRWMNWPSLFLGFATSWAVPGTWVTMTDHYNWGMILNIAIASCCWTCIYDTIYACQDIKYDEKAGVKSMPVHLGKAIRPVLTLFDATFFVCLLWAGYLNDQRLPFYMMSVLTPFLLCLWHIWSFDHNDPGDCWKKFTVRLAAIAIYHNFDMHGTPGRSPRRGDGLRWIDC

SEQ ID NO: 166 - protein, 292 aa, Artificial Sequence
  Description of Artificial Sequence: Synthetic polypeptide
  FungalPT_31
MDVAGKLIPETNMLDDYTHKRFRAIWEMGRLHTREAWLSVIPAVWGASIGARAGWTDGWSFAWVLFGIWASATVSHAAFCTWKQVERCKGRPLPSGLISVKEATFFFLCWILLTLGTTWYTLGPQATLCTTPAWLLGLIYPFMKRVMPFPQLVVGLSVASGVMPGYVSVRGILEFNGSVLALFGATACWIIFLDTAYASLAVFLGKRVRMFLALAAVITIAFFSTAALLSNLSLFTWIFGVGVWAASMIRSIFLLDLNVCASGGRVFKSNIEPGFYLTVVTLVEGYLQACFS

SEQ ID NO: 167 - protein, 384 aa, Artificial Sequence
  Description of Artificial Sequence: Synthetic polypeptide
  FungalPT_32
MLPPPALRSHEGIAGRLLVHRQRAVAFHQTLRKLQPSLDTAAPDKSANDERLAEYVPAQTGILSVVPKSWVPYGELIRIDKPAGTYYLFFPCLFSTLLAAPMAEPMASFSSVAATSALFFSGALIMRGAGCTINDLWDRNLDPQVRRTRLRPIARGAITPFQGVVFTGFQLLAGLAVLVQFPLPCLAYGIPSLALVTTYPLAKRVTYYPQAVLGLAFSWGAIMGFPALGIDLLSNSSALIAAACLYTSNIAWVVLYDMIYAHMDIKDDANAGIKSIALRHENQTKQVLTGLAIAQVALLGSAGVAAGAGPIFFLGSCGGALVTLGIMIKRVNLKSVRDCWWWFVNGCWITGGVISIGMAADYVARSLNQPELESAAEEDARLHA

SEQ ID NO: 168 - protein, 300 aa, Artificial Sequence
  Description of Artificial Sequence: Synthetic polypeptide
  FungalPT_33
MPSRARALFELTRLHWFPVGCDFMFWPFGWAFLSAAYRLSLPVNEVVKTTLFFALLGTLVHSAGCVMNDMLDRDLDRKVERSQGRPIASGVVTRIEASVLLAVLVAALFYLFSTCGIKAFTLGVVALPVCITTYPLMKRWMNWPSLFLGFASSWAVPGTWVATTDQYDWGIILNIAIASCCWNCIYDTIYACQDEKDDEKAGVRSMAVHLGKAIRPVLTLFDTTFFVCLLWAGYLNDQRVPFYMMSALAPFLLCLWHIWSFDRNDPQDCWKKFTAGRYGGAMVCVGLIADHHFKLSSPAG

SEQ ID NO: 169 - protein, 298 aa, Artificial Sequence
  Description of Artificial Sequence: Synthetic polypeptide
  FungalPT_34
MSIIQPYLDLMRVGKPTGTWLIFWPFAWGLTLAARTVGTDLSTYSRDLFYCFAGAFVLRSCVCTLNDICDVDFDRKVERCKTRPLPSGRVSIPSAVVFFMVQLGMCVAALGRMNQAATLLGLIGLFPLHCTYPLFKRWTYWPQAWLGLAMNFGLPVAWAAYTGEVNVPLMSSMLLGAWCWTMVYDTIYACQDMKDDKAAGVRSTALVLGDYIRPAMTFLSGLFIACLAAAGILVNAGPLYYAIGVAGAALHITWQLATVDLEKPSSCWNMFASNAKLGGIVWAGLAADYVQSIWPVAV

SEQ ID NO: 170 - protein, 333 aa, Artificial Sequence
  Description of Artificial Sequence: Synthetic polypeptide
  FungalPT_35
MAPRRSNAAPGAKPSGDYVPPTRGILSKLPASWVPYAELIRLEQPHGLYMTFFPQIIGLMFACSARPDAVPGSLLAQRLGLLFVWTFFIRSAGCAWNDNTDQDFDRLTERCRNRPIARGAVSTAQGHIYTLVLTLLAFMTIRPLPLESTLCGIVTIVLTTIYPFGKRFTNFAQVILGSTLASTIPLSAYSVGLPALSGEYIVPTLCLTATILLLVVFYDTIYARQDTADDLKSGVKGMAVLFRNHIESLLAFLALSITGLLATAGTLLNMGTYFFAFSVVGLATGLFVMIALIRWHVLPSFAKYAGWFYAFAIANLLGGCIVEYLGRAPALFA

SEQ ID NO: 171 - protein, 292 aa, Artificial Sequence
  Description of Artificial Sequence: Synthetic polypeptide
  FungalPT_36
MMGTVMQGQWRDYCRLMRIDKPIGSLLLMWPTLWALWLASGGMPPLKILIVFVLGVFFMRAAGCVINDYADRKVDGHVKRTAGRPLPSGAITSAQARMLFAALILLSFCLVLLLNGKTILLSLGGLALAWIYPFMKRVSNLPQVVLGAAFGWAIPMAYMAVSEAVPLSCWLLFLANICWTVAYDTQYAMVDRDDDLRIGVKSTAILFGRYDNLINGLLQLATLVLMATVGHLNQLGAPFYWSLLLAACLFVHQQKITAKRQREQCFQAFRNNNYVGMVMFIGILLSYSMAGG

SEQ ID NO: 172 - protein, 328 aa, Artificial Sequence
  Description of Artificial Sequence: Synthetic polypeptide
  FungalPT_37
MASRSSRGVRLGADYAPPTQGILSKLPASWVPYAELIRLNQPHGLYMIYFPHIVGLMYACSARPTAVPGSMLAHRLVLFAVWTFLMRGAGCAWNDIVDQDFDRKTERCRNRPVARGAITTINAQLYTLALTLLAFVSLAFLPAECTLCGIFSTILSTIYPFGKRFTNFAQVILGSALASTIALSAYAVELPALSPTYAIPTMCLTATILLLVVFYDTIYARQDTADDLKSGVKGMAVLFRNHIEKLLAVLTCTIVGLLATAGTLLDMGPYFFTFSVFGLATGLLIMIALIRWHLFPSFAKYSGWFYALAIVNLLGGCVGEYLQKAPAL

SEQ ID NO: 173 - protein, 334 aa, Artificial Sequence
  Description of Artificial Sequence: Synthetic polypeptide
  FungalPT_38
MAPATRTPIHPEAAAYTNPRYETGPLSLIPKPIVPYFELMRFELPHGYYLGYFPHLVGIMYGASAGPERLPARDLVFQALLYVGWTFAMRGAGCAWNDNIDQDFDRKTERCRTRPIARGAVSTTAGHVFAVAGVALAFLCLSPLPTECHQLGVLVTVLSVIYPFCKRFTNFAQVILGMTLAANFILAAYGAGLPALEQPYTRPTMSATLAITLLVVFYDVVYARQDTADDLKSGVKGMAVLFRNHIEVLLAVLTCTIGGLLAATGVSVGNGPYYFLFSVAGLTVALLAMIGGIRYRIFHTWNGYSGWFYVLAIINLMSGYFIEYLDNAPILARG

SEQ ID NO: 174 - protein, 341 aa, Artificial Sequence
  Description of Artificial Sequence: Synthetic polypeptide
  FungalPT_39
MDEVRGYSRPSHGLFRFIPDPWVPYAELMRLDRQAGFWAFYWHYLIGLGFAINIRPFSRDLDLEDLVLLAAYLALWTTVFRGITCTWNDNLDQDFDRQVARCRVRPIPRGAVTTLQAHIFTAVQIAVGACILYPFGSSTLIHATVDGVFLFIYPFLKRCTNYPQVELGFGLSYAIFLVTAMVGKDPLAPLLDPSLDLSARVSKVVQAPLAQSAAYLYVAGIIWTVIFDTIYAHQDYLDDLKAGVRGLAVRLGRNGTKPACYIAGAVQVYFLVLAGQLAGFGAAYYAISCGVTALLLARMIWVVDLEDGDSCAWAFGPGSGYVGTAICAGLFADFFSKKYGY

SEQ ID NO: 175 - protein, 423 aa, Artificial Sequence
  Description of Artificial Sequence: Synthetic polypeptide
  FungalPT_40
MSVLLPAPAQGLFKLPGGCRSTILRALHRKPTVCFLVTTSHLTTITTPSRRRPQSQKTSSCVAIRNFRPATSCSSTIALHKKSISFPPPSNTDSTLPTPYTPPANGLLSKLPASWVPYAELVRIDKPTGAYYLYFPCLFSTLLAAPLAHPIASPLSVVGTSLLFFSGALIMRGAGCTINDLWDRNLDPHVARTRLRPIARGAISPFRALTFTGAQLLTGLAILLQFPTQCLFYGIPSLLLVATYPLAKRVTYYPQFVLGLTFSWGAIMGFPALGVDLLQNTAALTTAGFLYASNVAWTVLYDMIYAHMDIKDDAKAGIRSIALRHDAQTKQVLTGLAVTQIGLLAAAGVAAGAGPVFFVGSCGGAAVTLAIMIKRVNLKSVKDCWWWFVNGCLLTGGVISAGLAGDYVVKYIQQDGGSERRDV

SEQ ID NO: 176 - protein, 335 aa, Artificial Sequence
  Description of Artificial Sequence: Synthetic polypeptide
  FungalPT_41
MASQTTLSEKQALVQGKETTKSDGLSQQYGGLHPEGWVDRLPESWIPYIQLSRLSPPAGFFLIYFPHTFGALHAASVHGLPIQDVLRVCLILLGGSFFCNNASHAWNDLVDAPVDAQIERTRMRPIPRGAISYRAAFIFACTQAIAAAAFLLFLPRDASLAAIPTIIGTIYYPWAKRHTNLPQFVLGFCLTWGIMVGSSGMGVSQPWTDASTVSLLLASILWVVVFDTIYAHQDIVDDLKVGVKSTAILIQGFAKPALWSMFLSMIGCLIASGYYGGMGLPYYGLVVGGCVVSVGSMIARVDLADPASCWRWFSQGFWLTGAAIASGLLAEYLIL

SEQ ID NO: 177 - protein, 333 aa, Artificial Sequence
  Description of Artificial Sequence: Synthetic polypeptide
  FungalPT_42
MPATRTPIHPEAAAYRNPRYQSGPLSVIPKSFVPYCELMRLELPHGNFLGYFPHLVGLLYGSSASPARLPANEVAFQAVLYIGWTFFMRGAYFAWNDVVDQDFDRKTTRCRVRPVARGAVSTTSANIFGFAMVALAFACISPLPAECQRLGLMTTVLSIIYPFCKRVTNFAQVILGMTLAINFILAAYGAGLPAIEAPYTVPTICVTTAITLLVVFYDVVYARQDTADDLKSGVKGMAVLFRNYVEILLTSITLVIAGLIATTGVLVDNGPYFFVFSVAGLLAALLAMIGGIRYRIFHTWNSYSGWFYALAIFNLLGGYLIEYLDQVPMLNRA

SEQ ID NO: 178 - protein, 597 aa, Artificial Sequence
  Description of Artificial Sequence: Synthetic polypeptide
  FungalPT_43
MISTPEALLAFVCWVPFTFAITWATLGPAVTVSFIPVWVLSVIYPFMKRLMPFPQVVLGAIIGGAVFPGWVGVTGDLDHLDQALPLFFATAAWVVYFDVFYATQDLPDDKKAGVRSLAVWMGPNVKILLAGLGILQIAFFAMTALRADLSLIFWILGIGVWAVSVPWHVLSLNLKDRHSGGWVFKANIKLGLYMTGVSLLELVLLRVHHAPMKNHLPLTRASSPSITNQTFAMDRIDVHHHFIPPAYVEAFKTTGGDPSGWHLPQWTPESSLSLMDSHNTRTAILSLTAPGTSILAHSPGASATLAREINLYAAKVHNENPTRFGFFASLPHLTPDTIPAAIEEAIYALETLHADGITLYTRYTGTGYLGHDAFAPLWEELNRRKAVVFIHPTNTAADARNRSILVNPALPQPIIDYPHETCRTAVDLITSGTISRNPDVKIILSHGGGTLPILATRAAHLLYDAKLTSISPEDFLEQARSFYFDLALSGNDENMQLLVGRNGFAKGGHVFYGSDFPYAPVSTINKYVRMMEGFSVQGEEVEKAIARDSAVKLFPRFQMPADLRVGKTINWGAFSACLLLPVSLSVLYSVLQSRVHT

SEQ ID NO: 179 - protein, 350 aa, Artificial Sequence
  Description of Artificial Sequence: Synthetic polypeptide
  FungalPT_44
MAADSRASTMTMNAIKVPDHTTIHTPPKSTPIPPASETSYYPPTSGLLSHVPPSWIPYGELMRITKTTGIWVIYLPHLFGTLYVAASGTTHTSATSILHTNLTLFIYAFVLRSAGCAWNDIQDVEFDRQVRRCRNRPMARGALTMRQGYLFTGALTLVCGMILLALPALCCVVAVPSWGLAVAYPFAKRVTDFPQVVLGVQVAIGVGMGMAAVDANALYEARYAREAVVAFFMANVVWTLVYDFVYAQMDLEDDVKAGVRSMAVRFQDRPKVLLSVMVFALISLLGLTGYWQGFGIAYYGVACGGILASMLWMLVTIDLRSQADCRWWFTECTRLVGWSISSGLALDAFL

SEQ ID NO: 180 - protein, 300 aa, Artificial Sequence
  Description of Artificial Sequence: Synthetic polypeptide
  FungalPT_45
MPAVRGYFELTRLHKPFMGNTLMFWPCAWGLTIAARATTLPLVIFAEKLVWFGLGSMLLHSSACVLNDICDVEFDRQVERTKERPLPSGRVSMQGAVTLCAVLLAPALYILSHCDRLGIAMGIVGVFPLHAFYPLMKRWTWWPQAWLGLAFNWGIPVAWISVTGTMPPHAIWVLFFGGVCWTIVYDTIYACQDREDDRRVGIKSTALLFGEHVRSILAIMVTTLLVCLVYAGYALGQGIGYAVLSCGGTLLHTAWQIATWNEADLKDHRAKFESNGILGCVIWLGLLYDYIRVLYPGTIV

SEQ ID NO: 181 - protein, 300 aa, Artificial Sequence
  Description of Artificial Sequence: Synthetic polypeptide
  FungalPT_46
MPSQTRALFELTRLHWFPVGCDFMFWPFGWAFLSAAYRLALPVNEVIRITLFFALLAILVHSAGCVLNDMLDCDLDRKVERSRGRPIASGVVSTTRASMLLSVLITALFYLFSTCGTKAFTLGVVAFPVCIATYPLMKRWMNWPSLFLGFASSWAVPGTWVAMTDHYNWGIILNIAIASCCWTCIYDTIYACQDIKDDEKAGVKSMPVHLGKAIRPVLTLFDATFFVCLLWAGYLNDQRLPFYMMSVLTPFLLCLWHIWSFDHNDPGDCWKTFTAGRHGGAMVCVGLIVDHHFKLLSNAG

SEQ ID NO: 182 - protein, 353 aa, Artificial Sequence
  Description of Artificial Sequence: Synthetic polypeptide
  FungalPT_47
MALLSRSTTAARQIPPPPPPPLPAAATPYEPPKTGLLAQLPPSWVPYAELIRLDKPAGTYYLFLPCLFSTLLAAPLAAPMAAPTTVLGTSLLFFAGALIMRGAGCTINDLWDRNLDPHVTRTRLRPIARGAVTPFQALVFTGAQLFAGLAILLQFPLSCFFYATPSLLFVAAYPLAKRVTYYPQFVLGLTFSWGAIVGFPAVGVDLLSNGPALTAAACMYASNVAWTVLYDFIYAHMDARDDVKAGIKSIALAHDQSKQLLVGLAAVQISLLAAAGVTAGAGPAFFVGSCGGAAVTLGYMIKKVNLKSVKDCWWWFVNGCLLTGGAISAGLAVDYGLKYTQEADNKKTELVEG

SEQ ID NO: 183 - protein, 342 aa, Artificial Sequence
  Description of Artificial Sequence: Synthetic polypeptide
  FungalPT_48
MPILAPLGPSPLSEVFTYSNLPSPVEMATGKDYRHSKAGILSKLPPSIKPYAELLRIHRPLGYYLNISPYVVGVAYTAAIAPVSLPATVLLNRLIILSLWGFLIRSGGCAWNDLIDMDIDRQVSRTKLRPLPRGAISPTSAALLTAIIFGCGGLLLLLLPSQCTVEAGIILFFALLYPFGKRFSDYPQLILVNIAWAIPMAMSSLEVDPLDFPYSTLSMCIFIASVIVMIDVVYACQDAEEDKKIGARSMAVRYSDITDQLAYGFFFSGAISLLLGGVLRGLGLPFIVFSVGGHIFGFLRFLSVTLGEGTRSASVESRAKSSCLLATVFWVLGFFLEYLARS

SEQ ID NO: 184 - protein, 331 aa, Artificial Sequence
  Description of Artificial Sequence: Synthetic polypeptide
  FungalPT_49
MAGRSDETILLIAHRNSPKYVIRFPLDLAPSHVRPYLELIRLEKPTGTVLMFWPFAWGLTMAAFATGLPLQLYGSHLIECFISAFLLRSSACTVNDIFDREIDAGVERTRGRPLASGRISVFAATVYLFVQYIIGISFFYVTVNDQALWVGLFQLLPLFAIYPLLKRFTHWPQAWLGFAMNFGFVTAWVSLTGRLDVKLISIAMTGCWFWTMLYDTIYACQDIQDDIKMGVRSTAILFGSWIRPLLVLCGVGFVTMLGLAGYINGQGPYYFVLSVGGTTAHLVWQFKLVDLDVPASCWQNFKNNGHLGWIVWCGLMVDYLSSIGFFQYVRS

SEQ ID NO: 185 - protein, 295 aa, Artificial Sequence
  Description of Artificial Sequence: Synthetic polypeptide
  FungalPT_50
MAYFRLMRLHKFPAGSIVVFWPCAWGVIMSASITDMKPPQVAIQLVLYLIGSTIRHSAACIWNDICDREFDREVERCKTRPFVAGTVSMTGAVTLLISQLALGIGLLVYAGPVATRVGLFGLVFLDFPYPLMKRWTWWPQAYLGLAMTWGLPVSWVSIVSHMDWTVVPVLFLGGVSWTIHYDTIYACQDRRDDVKAGVRSTAVLFGDHVRPILSCFATFFVASLALAGVQNAQGPLYFVMTVVGTAGHLAWQLATIDFDVSADCWRMFKANGNLGYIILSGMLADYLYRCTDMLG

SEQ ID NO: 186 - protein, 287 aa, Artificial Sequence
  Description of Artificial Sequence: Synthetic polypeptide
  FungalPT_51
MPSRARSLFELTRLHLFPVGCDSTFWPFGKIDDELAYLTYEGLTNRIGSCHQDRGFSSSGGSPCHRLLYVFAYWFKSLHNRCCFTPSLWRGVSVNEALDALTFSVPRYGQSFGASWAVPIAWVATTGQFNWGMILNFSIASCCWACLYDTIYACQDKKDDEKAGVRSMAVRLGNGIRPVLSLFDLTFFVSLLCAGYLNGQGLLYYVISVIAPFLLCLWHIWSFDHNDPKDCWEKFTIRITDISTQAVMARLWNERKCIVLSWALSSKDKKQVTDEFYVTTISQLDDR

SEQ ID NO: 187 - protein, 320 aa, Artificial Sequence
  Description of Artificial Sequence: Synthetic polypeptide
  FungalPT_52
MSSASVASQEKQSLLSGTVNASPKPLQPWWRGYWELARMHKFPAGSMLVFWPTAWGYVMALRDNRPEPLQLAYIMAVFFVASTLLHSAACTINDICDRDFDAKVERCKNRPLVAGTVSMFGAWVFLFLQVAAFFWMLSYTNKEAFLCGTFGVFPLHAFYPLMKRWTNWPQAWLGFAMNWGLPTAWLMAAPNDWQFAPMWAFTIGTVSWTIVYDTIYACQDRKDDVKAGVRSTAVLFGDYVKPILSCFAAAFIASLIYAGVTTGQGWIYYAVSVAGCAGHLLWQLITLDTEDPQDCWNKFDSNGYLGYVVFAGLLGGWYIY

SEQ ID NO: 188 - protein, 339 aa, Artificial Sequence
  Description of Artificial Sequence: Synthetic polypeptide
  FungalPT_53
MAASRIPKARDRTASDRASPVRDAAQYTAPTKGILSKVPASWVPYGELMRIHQPHGIYMIYFPHLLGLMYASAVQDVVVAPQTLGRCAAVLLIWTVFWRSAGCAWNDNIDQDFDRKTTRCRNRPIARGAVSTANGHIFTLVLSLIAFGSLHLLPSECTLVGLASLALAMIYPFGKRFTYYPQVILGSTLGSTVSLSAYSVGLPALSPPYLGPTLCLSATVTLLVVFYDVVYARQDTADDLKSGVKGMAVRFRNHIEGLLAVIVVSITGLLTMAGIMIGARQSYYLFSVAGLTSGLVSLVASTRWDLLHGWGVSSGWCYALAIASLVGGLATEYVLYKLN

SEQ ID NO: 189 - protein, 303 aa, Artificial Sequence
  Description of Artificial Sequence: Synthetic polypeptide
  FungalPT_54
MPSRMRALFELTRLHWFPVGCDFMFWPFGWAFLSAAYRLALPVNEVVKTTLFFALLGILVHSAACVINDMLDRDLDRKVERSQGRPIASGVVTRTEASILLVFLVAPLFYLFSTCGTKAFTLGVIAFPVCITMYPLMKRWMNWPSLFLGFSSSWAVPGTWVATTGHYNWGIILNIAIASCCWNCIYDTIYACQDEKDDKKAGVRSMAVHLGKAIRPVLTLFDVTFSMCLLWAGYLNDHGLPFYIMGVLVPFLLCLWHIWSFDYKDPRDCWKKFTAGRLRRDDGLRRINYRSPLQTLVRRRLRI

SEQ ID NO: 190 - protein, 319 aa, Artificial Sequence
  Description of Artificial Sequence: Synthetic polypeptide
  FungalPT_55
MNVSITPSSQRNVPRGIWELARLHTREAWLCWYPAIWGACVAAGMRDVSLELTTFLRLLFGIWASVTATHCAFCTFNDICDRKLDKHVERCKVRPLPAGMITTSEAVVAFICWLPITLAVTWGTLGPAVTVGFIPVWVLSTLYPFMKRIMPFPQVVLGAIIGGAVFPGWVGITGDLKNLDEALPLFFATASWVVYFDIFYATQDRPDDEKIGVKSLAVLMGKNVQILLAALGALQMLLFAVTALRADMSLIFWVLGLGVWMVSVPWHILSLDLKDRHSGGRVFRSNIKLGLYLTGVSLLELFVVRVYDVSLANLKMELH

SEQ ID NO: 191 - protein, 340 aa, Artificial Sequence
  Description of Artificial Sequence: Synthetic polypeptide
  FungalPT_56
MAPSSSRATARESPEKKPLIGEAPPYKPPTKGFLSILPASWVPYAELTRIHQPHGIYMIYFPHLVGLAYAASVQQADLAMPPSELAYRAAVMLGWTVFWRSGICVWNDNIDQDFDRKTARCRNRPIARGAISTAQGHVFALVLNLIAFAWLRLLPRECTLVALGSTVLGMIYPFGKRFTYYPQVILGSTLGSTVALSAYSVGLPAVSPPYLGTTACLAAAVLLLVVFYDTVYARQDTADDLKSGVKGMAVRFRDHIEGLLAVLAVSIAALLTTAGVLMEAQQYYYVFSVGGLTMGLISLVALTHWDLLPSWAGSSGWCYALAIANLIGGMASQYVLRGAA

SEQ ID NO: 192 - protein, 348 aa, Artificial Sequence
  Description of Artificial Sequence: Synthetic polypeptide
  FungalPT_57
MGQSSRPLVETFSAATTTGPAPYKPPETGLLSKLPASWVPYAELIRLDKPAGTYYLFFPCLFSTLMAAPMAMPMASPGSVIGTSLLFFSGALIMRGAGCTINDLWDRNLDPHVSRTRLRPIARGAITPFRGLVFTGCQLLTGLGILLQFPLPCLFYGVPSLILVASYPLAKRVTYYPQAVLGLTFSWGAIMGFPALGIDLISHTTALTAAACLYTSNIAWTVLYDMIYAHMDIKDDVKAGIRSIALRHDAETKQVLTGLAAAQISLLAVAGYAAGAGPAFFIGSCGGAMVTLGLMIKRVDLKNVKDCWWWFVNGCWITGGVVSLGLGADYAIKYAEEHEEGNRPRAEC

SEQ ID NO: 193 - protein, 300 aa, Artificial Sequence
  Description of Artificial Sequence: Synthetic polypeptide
  FungalPT_58
MPSQARALFELTRLHWFPVGCDFMFWPFGWAFLSAAYRLTLPVDEVVKTTLFFALLGVLVHSAGCVLNDILDCDLDRKVERSQGRPIASGVVTRTKASILLTVLVAALFYLFSTCGTKAFTLGVIAFPICITTYPLMKRWMNWPSLFLGMTLRFIEKYPVLYCFKAFLLAGPSQEPIASCCWNCIYDTIYACQDKKDDKKAGVRSMAVHLGNAIRPVLTLLDATFFVCLLWAGYLNDQRLPFYTMSVFTPFFLCLWHIWSFDHDDPGDCWKKFTAGRQGGAMVCIGLIIDHYFKLSSHAG

SEQ ID NO: 194 - protein, 336 aa, Artificial Sequence
  Description of Artificial Sequence: Synthetic polypeptide
  FungalPT_59
MAARSRSPRRGTSEKTPLVEKEAPYQPPTRGILSKLPASWVPYAQLIRLEQPHGNYMIYFPHIIGLMYASAIRPTELSVLGHRAAIFAIWTFLMRGAGCAWNDNVDQDFDRKTERCRHRPIARGAISTTQGHVFTLILTLLGFAAIQSLPIECTYVGVGTTVLSAIYPFGKRFTHFAQVILGSTLASTIALSAYSVGLPALSKDYFVPTLCLSATIMLLVVFYDVVYARADTTDDLKSGVKGMAVRFRNHLEGLFAFITLSIAGSLTTLGYLVGMGHWFYLFSVGGLTFGLVSMVALTHWNILPGYSSGRCYAFAILNLLTGFIMEYATKDYVVGV

SEQ ID NO: 195 - protein, 349 aa, Artificial Sequence
  Description of Artificial Sequence: Synthetic polypeptide
  FungalPT_60
MAAPRLSNIFARAPKDEVVFDKVSSPSSQNGGSLTSSWITILPKTWIPYVELARLSPPAAPFLIYFPHLFGTLHAANVQPSSISNLLRSCVLLLWASLFFSNAAHAWNDLVDAPIDRKVSRTKNRPIASGIISSRAAIIFMVSQSLIAASFLLLSSVSTAMATLPTILGTIYYPWAKLHTHFPQVILGFCLAWGVMVGSRFAGLRQPWNDQAGLCLVFASSCWTIIYDTIYAHQDVAEDIHLGVKSLAVLFGGHVKPLLWVVLFMMGVSLTLYGQLIEVTIGYYVITLGGCIFSLGSMIFNVRLSDKASCWKWFSTGFWITGTSITLGLLSHYVQVRSGYREGLSECCL

SEQ ID NO: 196 - protein, 340 aa, Artificial Sequence
  Description of Artificial Sequence: Synthetic polypeptide
  FungalPT_61
MVSSTVQPAKTGGQSQGRGRVATSDYQPPTTGVLSKLPASWVPYAELIRLEQPHGLYMTYFPHILGLMYACSAKPTAVAPSVLAHRLAVFFVWTFFLRSSGCAWNDITDQEFDRHTARCRNRPVARGAVTATQGYIYAFLITALGFLTLYTTLPFECTLCGLATTILAMIYPFGKRFTYFPQVILGACQASTIVTASYSVGLPAFSAHYFIPTLCLTTTVLLLIIFYDTIYARQDIVDDLKSGVKGMAVLFRNHIEALLGGLTCSITFLLATAGSLLNMGPYFFAFSVVGLASGLVVMIALIRWHVLPGFEKYSGWFYAAAIVNLLGGCVAEYASRVFML

SEQ ID NO: 197 - protein, 323 aa, Artificial Sequence
  Description of Artificial Sequence: Synthetic polypeptide
  FungalPT_62
MARTTSSNNKFAAAILPLWQLSRFDTRESWLACYPAMWGLSLATKHYDLNIGGTGLAALVASNWLCMTLIHSAFCTWNTHMLKSFVQPHHTSTVRLIDKCAARTATRPLPSGRCSPAKAHTWFYVQLFLANTAMYTLLGPATHLTMLPCLALSFFYPLSKRYIQWPQFVLAPTVGWPVFAGWLSAQAHAGLREKMEPSICGPLFASYAVWTIYYDTCYGLQDIAGDKESGVGSLAQFLGVKYIKSFLLGLNVIALSFLGLAAERARCSLLLWTLGIGFWALSVPFQFRGLDPTVPGSGGKIFKFNITLGMYVTVVILAEAWIG

SEQ ID NO: 198 - protein, 333 aa, Artificial Sequence
  Description of Artificial Sequence: Synthetic polypeptide
  FungalPT_63
MAPRRSHAAPGARPSGDYVPPTRGILSKLPASWVPYAELIRLEQPHGLYMTFFPQIIGLMFACSARPDAVPGSLLVQRLGLLFVWTFFIRSAGCAWNDNTDQDFDRLTERCRNRPIARGAVSTAQGHIFTLVLTLLAFTVIRPLPLESTLCGIVTIVLTTIYPFGKRFTNFAQVILGSTLASTIPLSAYSVGLPALSGEYIVPTLCLTATILLLVVFYDTIYARQDTADDLKSGVKGMAVLFRNHIESLLAFLALSITGLLATAGTLLNMGTYFFAFSVVGLATGLFVMIALIRWHVLPSFAKYAGWFYAFAIANLLGGCIVEYLGRAPALFA

SEQ ID NO: 199 - protein, 402 aa, Artificial Sequence
  Description of Artificial Sequence: Synthetic polypeptide
  FungalPT_64
MPRLIIPKGTKCLLSQRPVLPSSQRLSSKFHSISRGTTYASTALSFPKPRHIIPVTSSSTSQRGAHTIDSPSSPVIPEPYSPPTSGILSRVPKSWIPYGELIRIDKPTGTYYLFFPCLFSTLMAAPLATPMATPLSVIGTSALFFAGALIMRGAGCSINDLWDRNLDKHVTRTRHRPLARGAITPFRALTYTGVQLLAGLGILLQFPTSCLFYGIPSLLLVASYPLAKRVTYYPQFVLGLTFSWGAVMGFPALGVDLLANSSALTAAALLYASNVSWTVLYDMIYAHMDIKDDAKAGIRSIALRHDAETKKVLSGLAVVQIGLLGAAGMAAGAGPAFFIGSCGGAALTLGWMIKRVNLKSVKDCWWWFVNGCWITGGAISLGLGADYLIQYSQEDALGRVED

SEQ ID NO: 200 - protein, 320 aa, Artificial Sequence
  Description of Artificial Sequence: Synthetic polypeptide
  FungalPT_65
MSSRPATERSALRRKEELSRPVTAPRPTQWWWQPYWQLARMHKFPVGSNLVWWPTIWGWLLALPERPDAVTLTVYISLFMVAGTILHSAACTINDICDVDFDRQVERCKNRPLVSGAVSIPAAWIFLFAQTGAFLWLLSYAGNETAWWCGVFGVFPLHAFYPLMKRWTNWPQAWLGLAMNWGLPTAWLMAAPQDVQSDAMWVLTFGTFCWTILYDTIYACQDKKDDANAGVRSTALLFGAYVKPILALFGAAFVGTLAYAGMRTGQNELYFGITVGGTAAHVAWQLITLNVDDPSDCFDKFVANGNLGYIVTAGMLAAMW

SEQ ID NO: 201 - protein, 601 aa, Artificial Sequence
  Description of Artificial Sequence: Synthetic polypeptide
  FungalPT_66
MAISTTQRSSRNVSRGIWELARLHTREAWLCWYPAIWGACVAAGMRDVSLELAPFLRLLFGIWASVTATHCTFCTFNDICDQKLDKHVERCKVRPLPAGMISTSEAIVAFICWLPITLSITWGTLGPAVTVGFIPVWVLSTIYPFMKRIMPFPQVVLGAIIGGAVFPGWVGITGDLNNLDQALPLFFATAAWVVYFDIFYATQDRPDDEKIGVKSLAVLMGKNVQVLLAVLGALQVLLFAVTALRAEMSLIFWVLGLGVWMVIKLLITMNRIDVHHHFIPPAYVNAFNSTPGDPSGWHLPKWTPESTLFLMKSHTTRTAILSLTAPGTSIISNSPVESATLARQINLYGFQLHQEYPTRFGFFASLPHLTPESITSAIEELTYALDVLQADGITLYTRYSGTGYLGHIAFAPLWEELNRRKAVVFIHPTNTASDAQNQPEMVNPNLPQPIIDYPHETCRAAVDLITSGTISKNPDVKIILSHGGGTLPILATRAANLLYDAGLTGITPERFLEQARGFYFDLALSGNQGNLGLLVGRNGFAKTGHVLYGSDFPYAPVDTINKYVEMMEDFFAHGGEKEIARGAAVELFPRFKIEEDNKEIL

SEQ ID NO: 202 - protein, 410 aa, Artificial Sequence
  Description of Artificial Sequence: Synthetic polypeptide
  FungalPT_67
MSRNGILSLLSGCRSALLGTSYGISRPALRDVAIYTRTTTLNPLKGSEPGRTLPQRFFHTRDRLSQSTTVSHLLGSNTTNIQGSTNDPAPYTPPTTGLLSKLPPSWVPYAELIRLDKPTGTYYLFFPCLFSTLLAAPLAIPTASPLSVIGTSFLFFSGALVMRGAGCTINDLWDRNLDPHVSRTRLRPIARGAVTPFNALVFTGAQLFTGLGILLQFPYQCLFYGIPSLLFVATYPLAKRVTHYPQFVLGLTFSWGAIMGFPALGVDLLSNHAAMTAAGFLYASNVAWTVLYDMIYAHMDIKDDAKAGIRSIALRHDEQTKKILSGLAVAQIGLLTAAGMAAGAGPVFFVGSCGGAAVTLAVMIRRVNLKSVKDCWWWFVNGCLLTGGAISAGLGGEYLVQCWQRKKEEV

SEQ ID NO: 203 - protein, 358 aa, Artificial Sequence
  Description of Artificial Sequence: Synthetic polypeptide
  FungalPT_68
MANPKSQKENYVAHTVSERGSRLEYKAPSNGIFSVLPKSWKPYAELMRLDRPAGFFAFYWHYLVGLGYGVAICKPIPSPIDVSLVAVYLAALVVVHRGAVCTINDNLDQEFDRKVARTQFRPIARGAVSTTQAYIFASIQYLILTSMILWHPYFHSHDIYTSLPTIILTVYPLAKRVTDFPQLILGFGFAAEIPFSAIIVGLDLQSAEHAFGPLLNLFVASAIWTIIFDTIYAHQDLKDDVKTGVGSLAVRLGQHSKPVLSVLAIVQVALLVTAGVQSAFSPVYFVISCGGAGLALLTMLVRVDLKSPASCAWWFGKGTAVVGVSLVTGLLGEYVARKYVTLESSYAVLSGQWYTDVA

SEQ ID NO: 204 - protein, 316 aa, Artificial Sequence
  Description of Artificial Sequence: Synthetic polypeptide
  FungalPT_69
MGGRAQNGEDEARGKVLSSLPPSLVPYAELMRVHRPLGYYLNTSPYVVGVVFGAAVAPTKLPATILLDRLLILVLWSLFLRSAGCVWNDVIDMDLDRQIARTRLRPLPRGAVSSWNAVMLTAGIFACGGSLLSFLPRECAIEALIEIFFALLYPFGKRFTDFPQLILVNIGWAIPMSMHSLGLDPLAYKKPTFFMFLFIALVIVMIDVVYSRQDTEEDMKVGVKSMAVRFKHSIELLSYAFFYASTGALLAAGYYSGLGIPFTVLSVGGHFGGFLYFLKTTGVGKAPQVESYAKLACLIASLFWVVGLFVEYYLRV

SEQ ID NO: 205 - protein, 415 aa, Artificial Sequence
  Description of Artificial Sequence: Synthetic polypeptide
  FungalPT_70
MLARQLAHGGLRCHLANARPARYQLLNRASHWLHHSSTHRPLVARPAAPRPLSSAAGSPERPSFLSLRRSHQAASAAPPPELEPYSPPTAGILSHLPKSWVPYGELIRLDKPTGTYYLFLPCLFSTLLAAPLATPMTPPLTVLGTSLLFFSGALIMRGAGCSINDLWDRNFDPHVARTRHRPIARGAITPFAALTFTGFQLLAGLGILLQFPLSCLYYGIPSLALVALYPLAKRVTYYPQAVLGLTFSWGAIMGFPALGIDLLASTPALTAAACLYGSNIAWTVLYDMIYAHMDIKDDQKAGIKSIALRHDAETKKVLSGLAVVQISLLAAAGTAAGAGPAFFVGSCGGAAVSLAWMIKRVNLKSVKDCWWWFVNGCWITGGVIAAGLGLDYAVRYLGEAESSQKLVAAPGEDDL

SEQ ID NO: 206 - protein, 366 aa, Artificial Sequence
  Description of Artificial Sequence: Synthetic polypeptide
  FungalPT_71
MESIIARPRTRSSAKEKTQTMSAKKISANGNNIAVQAKSRRNTPLGVIKLARLHTLESLLCVYPAIWGACLSAGSHQKVFTPSSFLSVLFANWISMTIAHMAFCTFNDIVDRNFDGKVERTKVRPLPAGMISLRSAIIAFIVEMGLTVYISYATLGFDGALVCAPVWIASTIYPFMKRVVQWPQLVLGPIIGMAVFPGWVSVAGNLDTLRDAVPMFLATSAWVVYFDTIYATQDTNDDKKIGVRSLAVLFHNHMHQFLGFLGSIQIALLSFTARKANMSALFWSLGVCVWGLNIPFHLLSLDTKNPKTGGKVFMMNILLGLWITIVCVIELWTTTVMHLDVNDFLLKTVVHNITLTAQNIRSSVAF

SEQ ID NO: 207 - protein, 348 aa, Artificial Sequence
  Description of Artificial Sequence: Synthetic polypeptide
  FungalPT_72
MATQALNESEVRTVATNGPEYVPPKAGLLSVLPSAWVPYAELIRLDKPSGTYYLFFPCLFSTLMAAPMTMPVVSPGTVIGTSLLFLSGAIIMRGAGCTINDLWDRNLDPHVTRTRLRPIARGAVTPFNALVYTGVQLFAGLGILLQFPLPCLFYGVPSLLLVASYPLAKRVTYYPQFVLGLTFSWGAIMGFPALGIDLLSNSAAFAAAGLLYASNIAWTVLYDMIYAHMDIRDDAKAGIRSIALRHNAETKQVLTGLAVTQVALLAAAGYAAGAGPVFFIGSCGGALATLGIMIKRVNLKSVKDCWWWFVNGCWITGGTIGLGLAGDYALRYSQDAKDGKQDNVVESV

SEQ ID NO: 208 - protein, 329 aa, Artificial Sequence
  Description of Artificial Sequence: Synthetic polypeptide
  FungalPT_73
MPSRRANRAAASAPRYSPPTSGILSYFPSSWVPYAELIRLEKPHGIYMIWYPYIMGLLYSARISENTLSLELLCKRALDLTIWTFILRSTGCAWNDNVDQDYDRKTARCCNRPIARGAISTVQGHIYVAALTGLGFTSIQHFPVECTFDACAILLLAAIYPFGKRFTHFAQVPLGATLSGAIVMAQHSVGIDPLSNENLRPTACLVVSIILLVVFYDVVYARQDTVDDLKSGVKGMAVLFRNWIKTLLLSLVSGIAALLFLAGRFADMRRAFFYSSVGGTALGLLTMIMVINTSQVARYAGRFYILAIGCLLGGFAVECYDKYEAVFTW

SEQ ID NO: 209 - protein, 327 aa, Artificial Sequence
  Description of Artificial Sequence: Synthetic polypeptide
  FungalPT_74
MARTSEKTPLVRREAERLPFPLGLVSPGVRPYLELIRFHKPTGTILMFWPFAWGLTMAAYHTELPLNRYWVELAKSLFAAFIVRGSACTINDIFDRKFDAGVERTKGRPLASGRVSVFAAVVYLILQYIAGLVVYVSYNEIALYAAVLQLLPLFLVYPLMKRITYWPQAWLGICMNFGLVVAWAAVTGSLDAQLLGVLMVGTWGWTMHYDTIYACQDRRDDVKVGVKSTAVMLGDYVRPFCFVLSMMFVGTLYYAGVLNHQTPYYFYISVGGTLLHILWQYATVDLDSPDSCGLNFIRNGHMGWITWAGLMVDYLVKIDQLPFQLPF

SEQ ID NO: 210 - protein, 305 aa, Artificial Sequence
  Description of Artificial Sequence: Synthetic polypeptide
  FungalPT_75
MPSRARALFELTRLHWFPVGSDFMFWPFAWGSLAASYHVALPMNEVVANTLFYALLGTLIHSAGSIINDILDRDFDRKVERSKGRPIASGAVAMTEASVLLIMLVAAIFYMFSTAGPTAFTLSLVALPASGGSYPLMKRWIYWPSLYLGFATSWAVPLTWVAITGQFDWGIILNVTVASCCWTCIYDTIYACQDKKDDEKAGVRSMAVRLGDNIRLALSVFDVVFFACLLWAGYLNGHHLTFYVMSVVAPFLCLWHIWSFDHNDPQDSWKKFTAGRHGAALVCAGLVADHYFNLAPERAFWLDSR

SEQ ID NO: 211 - protein, 309 aa, Artificial Sequence
  Description of Artificial Sequence: Synthetic polypeptide
  FungalPT_76
MYSRSWILNALPAPLVPYCELTRVGYLPIGVLVSYLPVLVAILHVAAVARLPYDNILDSCLQWLPLCYVYSAYGCVVDDIADQDLDRKVERCQHRPLVRGAVSTTSACLFAASLASLAVFLTKTFFPDQPAVHIPVALAGSIIYPFLKRFTNFALLYLAFLYVATGLNASRTIGYDILSAPDHLLTSNLLLAAAVFIANVSVETIYMHADLEDDIKSGIGSLAVKIQGYSKPVLFLAAVAYGSLVLASGLAAEFGKWYFTGAITSALTLFTLVARVDLKNGKMCEQFFFMGNAVLMSLLAAGLYGECIA

SEQ ID NO: 212 - protein, 397 aa, Artificial Sequence
  Description of Artificial Sequence: Synthetic polypeptide
  FungalPT_77
MAADVRANNHCLLGNLVNYADNTQIIPVNLSVVFLRQLSNYCHLTAEPPSPTWWWYFKLTRLHKFPAGSILLFWPCAWGIAMSAYRVNLPLGQVITQTVLYLLGSTLRHNAGCIWNDICDRDFDRQVARCKTRPLACGAVSVTGAVVLFIAHLIACSILVKLSGSAGFRIGLVGLFFIDTLYPFMKRWTNWPQAWLGLAITWGLPVSWISIRGPADLDAMFVLFVGGVYRRDDVKAGVRSTAVLFGNNVRPILAIFAALFVGCIAYAGVRNGASYSYFALSVGGTALHLAWQLRTLDFDNSAECWDMFTLNGNQLGMIIWGGMLGDYSHVISDVQLNFRHKLSQAVRRYSTFNVQCTTQMIISVRHGRTSGNRSDQLQAPNANKFWRASRNKHLTIQ

SEQ ID NO: 213 - protein, 316 aa, Artificial Sequence
  Description of Artificial Sequence: Synthetic polypeptide
  FungalPT_78
MATVEEKLLPKTEMPDTNYTHKRLRAIWEMGRLHTREVWLIVCPALWGASIGANAGETSGWSLTWALFGVFASTGLSHVAFCTWNDICDVEYDKQVERCKTRPLPSGLISRKEATFVFLGELLLCAGVTWLTLGLQATLAITPAWLLGFIYPFMKRIMPFPQVVVGFSVASGVMPGYVAVRGTLEFTDSLLALFAATTCWIIFIDTAYAIQDMLDDAKAGVQSLAVFLGQRVRWFLALSAGITIILFAVATFLSSLSLFYWIFGVGIWAVRMMRSLYFLDLSDTASAGHVFKSNIESGLHFTIVTLVEGYLQACVF

SEQ ID NO: 214 - protein, 322 aa, Artificial Sequence
  Description of Artificial Sequence: Synthetic polypeptide
  FungalPT_79
MPPSRVSALPRYSPPTKGFLSYVPSSWVPYVELTRFEKPHGIYMILYPYIMGLLYAAKIAPAPISLSFFISRAITLTIWTVFLRSAGCAWNDNVDQDYDRKTARCCNRPIARGAISTLQGYVFTTVLVLFGYLSLQDLPIECKMDATVTLALACIYPFGKRFTHFAQVPLGATLSMAIISAQHSVGVDPFSQENIVPTACLVSSIIMLVMFYDVVYARQDTADDLKSGVKGMAVLFRNWIKTLLVSLIAGITALLYTAGHAVGMSALFFQLSVAGPAVSLLLMVTLMSINSKKYAWYAGKSYVLAIACLLSGFSVEYYKTIV

SEQ ID NO: 215 - protein, 319 aa, Artificial Sequence
  Description of Artificial Sequence: Synthetic polypeptide
  FungalPT_80
MTVSTTPKSQRNVARGVWELARLHTREAWLCWYPAIWGACVAAGMRDVSLELAPFLRLLFGIWASVTATHCAFCTFNDICDQKLDKHVERCKIRPLPSGMISTSEAVVAFICWLPVTLAITWGTLGPAVMAGFIPVWVLSTIYPFMKRIMPFPQVVLGAIIGGAVFPGWVGITGDLKDLDQALPLFFATASWVVYFDVFYATQDRPDDEKIGVRSLAVLLGKNVQILLAVLGALQVLLFAVTALRADMSLIFWVLGLGVWMVNVPWHILSLDLKDRHSGGRIFKSNIKLGLYLTGVSLLELFVVRVYDISLANMKMELH

SEQ ID NO: 216 - protein, 323 aa, Artificial Sequence
  Description of Artificial Sequence: Synthetic polypeptide
  FungalPT_81
MASAAADSTPKTPLLNKQTSSAFSKPRWRLYWELARMHKFPSGSILVFWPCIWGYLLGTRGNPSGVTTLARYFIAFLIGSTLLHSAACTINDICDRDFDRQVERCKNRPIASGAVTVFQATVFLLLQVGIFVLMLTQANRTAFLCGLFGVFPLHAFYPLMKRVTNWPQAWLGLAMNWGLPTAWLMTRPEDINSVPMWALTFGTFCWTIFYDTIYACQDRKDDVEAGVKSTALLFGAYVKPILSLFGAVFVGTLAYAGIATGMPQPYFIISVGGCALHMIWQLGTLDVDTPEDCCKKFNSNGDLGYIVAGGMLAAMYTPDLFVF

SEQ ID NO: 217 - protein, 409 aa, Artificial Sequence
  Description of Artificial Sequence: Synthetic polypeptide
  FungalPT_82
MSTCRILPRLPLRPPFSQTTNSYKPCHPRLSIPTSRAVSAPRRLAIETHASSSTRSLIAYHTTTKLLSTATTTSPPTPTAPTTTELPSYTPPQTGLLSVLPQSWVPYAELIRLDKPTGSYYLYFPCIFSTLLAAPLAVPTTPPLTVLGTSLLFLAGAIVMRGAGCTINDLWDRNLDPHVARTRLRPIARGAVTPFRAVIFTGAQLLAGLAVLLQFPLSCFFYATPSLLLVATYPLAKRVTYYPQFVLGLTFSWGAIMGFPALGVDLLHNGAAQAAAACLYASNVAWTVLYDMIYAHMDIKDDAKAGIRSIALRHDRETKQVLSGLAVAQVALLAGAGIATGAGPAFFVGSCGGALVTLGIMIKRVNLKSVKDCWWWFVNGCWITGGAVTLGLTADYLVRYAERDDERST

SEQ ID NO: 218 - protein, 320 aa, Artificial Sequence
  Description of Artificial Sequence: Synthetic polypeptide
  FungalPT_83
MPPAVVRNSAYTPPTKGILSCLPSSWVPYAELIRLDKPHGIYMTIYPYALGLLYASQLTSESLPPNVVLSRFLNLAIWTFLIRSAGCAWNDNVDQDFDRQTARCRDRPIARGAISTLQGHVFTTALLALGFLSIQNFPLESKIDGAATVLLTCIYPFGKRFTHFAQVTLGLTLSVAIIFGPHSVGANPLSQGNFLPTTCLVSSIILLVIFYDVVYARQDTVDDLKSGVKGMAVLFRNWITTLLLTLIIAILTLLYITARSLDLGWVFFGLSVAGPAVSLLTTIALIASRSSSSRYAGKFYVLAIASLLSGFTIEYLRTIM

SEQ ID NO: 219 - protein, 584 aa, Artificial Sequence
  Description of Artificial Sequence: Synthetic polypeptide
  FungalPT_84
MISTPEALLAFACWVPVTLAITWVTLGPAVAASFIPVWVLSVIYPFMKRLMPFPQVVLGAIIGGAVFPGWVGVTGELEHLDQALPLFFATAAWVVYFDVFYATQDLPDDKKAGVRSLAVWMGPNVKILLTGLGILQIAFFAMTALRAELSLIFWVLGVGVWAVSVPWHVLSLDLKDRHSGGWVFKANIKLGLYMTGVSLLEIFLLRMQHAPIKLSAYTMDRIDVHHHFIPPAYVEAYKNTPGDPSGWHLPQWTPESSLSLMDSHNTRTAILSLTAPGTSILAHSPSASASLAREINLYGAKMHREYPTRFGFFASLPHLTPDTIPAAIEEVIYALETLHADGITLYTRYSGTGYLGHDAFAPLWDELNRRQAVVFIHPTNTATDARDQPILVNPALPQPIIDYPHETCRTAVDLITSGTISRNPNVTIILSHGGGTLPILATRAANLLYDAKLTTITPETFLEQARSFYFDLALSGNEENMQSLVGRNGFAKRGHVLYGSDFPYAPVPTINKYVRMMGLRSASRAEDAVDQAIARDSAVKLFPRFQIAADVRRVRKTNYWGFLSAGLLIPAGISVAYYYRILVR

SEQ ID NO: 220 - protein, 342 aa, Artificial Sequence
  Description of Artificial Sequence: Synthetic polypeptide
  FungalPT_85
MDEVKIYSRPSHGIFRFIPDAWVPYAELMRLDRQSGFWAFYWHYLIGLGFAINIPPFSSDLDLKALVFLAAYLGLWTITFRGITCTWNDNLDQDFDRQVTRCRLRPIPRGAVTTAQAHIFTAALIALGACILYPLGDSTRAHAVVDGVLLFIYPLLKRCTNYPQVELGFGLSYAVFMVAAMLGKDPLAPLLDQSSLDLSAGVSKVLGAPLAQSAACLYFAGIIWTVIFDTIYAHQDYTDDLKAGVRGLAVRLGRRGTKPACYIATAVQVYFLVAAGQLAGFGASYYAISCGVTALLLARMIWVVDLEDSNSCAWAFGPGSSYVGTAIFAGLLAEFFAKRHGY

SEQ ID NO: 221 - protein, 312 aa, Artificial Sequence
  Description of Artificial Sequence: Synthetic polypeptide
  FungalPT_86
MADQEFPEKCSHAHKPLLHFEDTHAWHPYLELIRLEKPTGTKLMFWPFAWGMTLAAYSQSMPVYSYVHHLAGCLFGAFIVRSSACTVNDIFDRKIDACVERTKGRPIPSGRVSVRAAVVYLLAQYLVGIAFFYATMDGLAFAIYPLMKRVTDWPQAWLGLAMNFGFLTSWISVCGAMNYPLIATLMTGCWCWTMLYDTIYACQDKKDDVKAGVRSTALAFGSHIRSLLTVFAITFVTMFTAAGAMNGQGLAYYLISVGGMSVHLIWQFSTVDLDVPESCWRNFQSNGTLGWIIWVGAALDYLYKMQVFSAFV

SEQ ID NO: 222 - protein, 366 aa, Artificial Sequence
  Description of Artificial Sequence: Synthetic polypeptide
  FungalPT_87
MCMQEYSTCPTIDHDGLHKICCYSHSQHDCRDPVIDMPPCCYPTLVRKQKMTVNPGSRSHHPKAGLLSYLPAALVPYGELLRVHRALGYYLNTSPYVVGIAYSAATAPTRLPLDLLLDRLLLLTLWSFILRSAGCAWNDLIDVDIDRQISRTQSRPLARGAISLPTATIFTACLFALGCSLFLFLPRQCAFEAGIEVFFALLYPFGKRFTDHPQLILVNIAWAIPMAMHSLGVEPGRQILSSICLCVFIATVIVLIDLVYSRQDTEEDLKVGVKSMAVRYRDCIDTLAYSLFAISTLALLFGGLLGGLRAPFVVFSVGGHIVGFWTFLRASLQTGPAGVESRAKSSCLMASIFWLLGLGIEYAVRV

SEQ ID NO: 223 - protein, 320 aa, Artificial Sequence
  Description of Artificial Sequence: Synthetic polypeptide
  FungalPT_88
MSTTRRSVTTRPSTSSRNVPRGIWELARLHTRESWLCWYPSIWGACVAAGVSDTVLEPVAFARFLFGIWASVTATHCAFCTFNDICDQSLDKHVQRCKVRPLPSGMISTPEALLAFVCWVPFTFAITWATLGPAVTVSFIPVWVLSVIYPFMKRLMPFPQVVLGAIIGGAVFPGWVGVTGDLDHLDQALPLFFATAAWVVYFDVFYATQDLPDDKKAGVRSLAVWMGPNVKILLAGLGILQIAFFAMTALRADLSLIFWILGIGVWAVSVPWHVLSLNLKDRHSGGWVFKANIKLGLYMTGVSLLELVLLRVHHAPMRVY

SEQ ID NO: 224 - protein, 300 aa, Artificial Sequence
  Description of Artificial Sequence: Synthetic polypeptide
  FungalPT_89
MPSRARALFELTRLHWFPVGCDFMFWPFGWAFLSAAYRLSLPVNEVVKTTLFFALLGTLVHSAGCVINDMIDRDLDRKVERSQGRPIASGVVTRAEASVLLVVLVAALFYLFSTCGIKAFTLGVVALPVCITTYPLMKRWMNWPSLFLGFASSWAVPGTWVATTDHYDWGIILNLAIASCCWNCIYDSIYACQDERDDKKAGVRSMAVHLGKAIRPVLTIFDTIFFACLLWAGYLNDQHVPFYIMGVLAPFLLCLWHIWSFDQNDPKDCWKKFTAGRHGGAMVCVGLIVDHHFKLSSSDG

SEQ ID NO: 225 - protein, 342 aa, Artificial Sequence
  Description of Artificial Sequence: Synthetic polypeptide
  FungalPT_90
MDEVKVYSRPSHGIFRFIPDAWVPYAELMRLDRQSGFWAFYWHYLIGLGFAINIPPFSSDLDLKALVLLAAYLGLWTITFRGITCTWNDNLDQNFDRQVTRCRLRPIPRGAVTTAQAHIFTAAQIALGACILYPLGNSTRTHAIVDGVLLFIYPLLKRCTNYPQVELGFGLSYAVFMVAAMLGKDPLAPLLDQSSLDLSAGVSNFLGAPLAQSAACLYIAGIIWTVIFDTIYAHQDYTDDLKAGVRGLAVRLGRRGTKSACYIATAVQVYFLVAAGQLAGFGTPYYAISCGLTALLLTRMVWVVDLEDGNSCAWAFGPGSSYVGTAIFAGLLTEFFAKKHGY

SEQ ID NO: 226 - protein, 265 aa, Artificial Sequence
  Description of Artificial Sequence: Synthetic polypeptide
  FungalPT_91
REYTPPKGLLSKIPASWVPYGELIRLHRPEFIYFIYAPFIVGLAYALCINKERVPAFTLAHRAGVLFVWTFFLRSSGCAWNDNIDQDFDRQTERCRNRPIARGAITTTKGHVFTIVLISLGFLSIRSLPFECTLVGIVTYVLTIIYPFGKRFTNFPQVILGSVLAMAIPLSSYSLGLPALSPPHIVPTACLSAAIVFLIVFYDVLYACQDIEDDLKSGVKGMAVYFRNYIEPLLITVTGLITGCLAMMGKLIDMGQLFFMFSVIG

SEQ ID NO: 227 - protein, 295 aa, Artificial Sequence
  Description of Artificial Sequence: Synthetic polypeptide
  FungalPT_92
MESARSNPYLELIRFYKPTGSILMFWPFAWGLTAAAYTTKIPLGEYAVLLMKSLLSAFIMRSSACTVNDIFDRDLDAGVERTKTRPLPSGRVSVVNACLYLLLQYIIGVLYFSTLSPLAFRAALIQLFPLFIIYPILKRVTYWPQAWLGFAMNFGIVVAYVQVLPAANRNLLSFMLAAAWCWTVYYDTIYACQDIRDDIKMGIRSTARLFGSRIRLALTMLTLGLVGLLTLVGRVNNQRLPYFLVSVGGGGLHLMWQLCTLNLAVPNSCWIAFKRNGQFGLIVWAGIFIDYVKTI

SEQ ID NO: 228 - protein, 349 aa, Artificial Sequence
  Description of Artificial Sequence: Synthetic polypeptide
  FungalPT_93
MQRANVLGKREKEVVVWVEEIKDGKMSPTTQPGCYRAPTSGFNSKLPSAWVPYAELMRIERPAGLYAFYFPYLIGLAYAACIAEPVVPSLEHVVALSGILLVWNIILRGAACAWNDNMDQDFDRQVTRCRNRPIARGAVTTVQGHVFTAVLCLSLIPILTLFPASCTYHTGAMLFLFGLYALAKRVTYYPQVVLGFPFAWAIFFCCAALQVDPFGPRVLLPTVSLFAANVLWTISYDTIYAHQDVRDDVKAGVRSMAVRFAHSTKLLVVMLSIAQVSLLILTGWLTAMSPAYFVGACAGTAVALGSMVVRVDLSKPSSCAWWFHWQFWFVGGSMVSGLFGDFVLRTGFH

SEQ ID NO: 229 - protein, 484 aa, Artificial Sequence
  Description of Artificial Sequence: Synthetic polypeptide
  FungalPT_94
MAGDATATEVFPVMDSIAVAMGDVESQLRVFHNVSRFLPTDDANQVFWWRTTGRHFAIMMHEARYSEARQVELLLFYRFVIAPRLGPRPTSATPWFHSRVAPGIGDGSPIGYSWRWGTGPDTKPLIRHYIEAIGPLTGTTADPLNEFAAKEMLYQLGQLVPGVELPLAWKFAAHIRPSLTDEPTRAVAGSSILIGLQCAPESAGIEVMAGLMTRSPAQVPELLHSIFPRAMRDAYGPDASLDGLNMVRDFVCHDPQGQYLTILGTTAIDCCAAASSRFKVYVTTTNTSFAHLAAVMTLGGRKPEAPESLTQLQELWYALKGLDPEFPVTAEPLSSVCGAANGTASGNPNANVSGVTFYFDIHPKYPFPHIKLQVDISKHTISDLGAINAVTEFLARRGQAADAQAYLNVVRAMVPDEELRTRRGLQAFFAFAFKNGAVDITSYFLPQIYRRYAEVQAELEPRKDCQGRSELSSKLQRRSRFDSY

SEQ ID NO: 230 - protein, 335 aa, Artificial Sequence
  Description of Artificial Sequence: Synthetic polypeptide
  FungalPT_95
MAPPSATTPLVRRDAPKAERLPFPLGLVSPGVRPYLELIRFHKAGLLLPTGTILMFWPFAWGLTLAAYHTELPLDRYWIELAKSLFAAFIVRGSACTINDIFDREFDAGVERTKGRPLASGRVSVFAAVVYLIIQYIVGIIVYVSYNDVALYAAVLQLLPLFLVYPLMKRITYWPQAWLGICMNFGLVVAWAAVTGSLDYKLLGVLMVGTWGWTMHYDTIYACQDRRDDVKVGVKSTAVMLGDYVRPFCFVLSMMFIGTLYYAGILNNQTPYYFWISVGGTALHIFWQYATVDLDSPDSCGLNFIRNGHMGWITWAGMMIDYLVKIDQLPFRMPF

SEQ ID NO: 231 - protein, 303 aa, Artificial Sequence
  Description of Artificial Sequence: Synthetic polypeptide
  FungalPT_96
MPSRARALFELTRLHWFPVGCDFMFWPFGWAFLSAAYRLALPVNEVVKTTLFFALLGTLVHSAGCVLNDILDCDIDRKVERSEGRPIASGVVTRTEALVLLAVLVAALFYLFSTCGTKAFTLGVIAFPVCITTYPLMKRWMNWPSLFLGFASSWAVPGTWVATTDQYNWGIILNIAIASWNCIYDTIYACQDKKDDEKAGVRSLAVHLGKAIRPVLTLFDATFFVCLLWAGYLNDQRLPFYMMSVFAPFLLCLWHIWSFDHNDPRDCWKKFTVRLAAIAMYPELYIVWYSRQAATAGRWSALD

SEQ ID NO: 232 - protein, 306 aa, Artificial Sequence
  Description of Artificial Sequence: Synthetic polypeptide
  FungalPT_97
MAPRVDRNNHDLVRGVWRLFRLHTIEGLSTVSIGWLALFFYAMQQDLPFALVRRAFIGILATYQITHCVFCLWNDICDRDFDAKVARTRDRPLPSGQVTLTEAVIVFVIGLAAAVALTYKILGADVTAIMVPIWGLSTIYPLCKRVIWAPQVVLGLTMAMCVLPPWMAVKPHSGDVGLLPASLFGAIFCWLVYIDLIYASQDRPDDKKAGVRSLAIFLGDYLKAGLTVLGVAQIVCFVVAAAEAQVGVFVWIFGIAVWSASVPWSIISLDLRDRKSGGRIFLMNAILGIYMAAVSGINVVSPAMWS

SEQ ID NO: 233 - protein, 321 aa, Artificial Sequence
  Description of Artificial Sequence: Synthetic polypeptide
  FungalPT_98
MPATRTPIHPEAAAYTNPRYETGPLSLIPKTWRDYCRLMRIDKPIGSLLLLWPTLWALWLAGGGMPSMKILLVFVLGVFFMRAAGCVVNDYADRKFDGHVKRTAHRPLPSGAISGRQARILFAGLVLASFLLVLTLNRMTILLSLAGLALAWIYPFVKRVSNLPQVVLGAAFGWSIPMAYAAVSEAVPLSCWLLFAANICWTVAYDTQYAMVDRDDDLKIGVKSTAILFGRFDNLILAVLTCTIGGLLAATGVSVGNGPYYFLFSVAGLTVALLAMIGGIRYRIFHTWNGYSGWFYVLAIINLMSGYFIEYLDNAPILARG

SEQ ID NO: 234 - protein, 331 aa, Artificial Sequence
  Description of Artificial Sequence: Synthetic polypeptide
  FungalPT_99
MASLHPSDEKATSIPQSSPASAPEFYAPYLQLIRFEKPTGTMLMFWPFAWGFTMAAYAAGLSLDAYCTGLTMCFVNAFIIRSSACTVNDIFDREVDAVVHCLLSYASTAYSASRPLPSGRISVQAATLYLMLQYALGIISMYLTERGLALWIGLFQLIPLFAIYPLLKRVTYWPQAWLGFAMNFGFVTAWVSVAGTDNYPVLFAAMAGCWCWTMLYDTIYACQDIRDDIKVGVRSTAILFGSWIRPLLLLIGIAFVSLLAVAGALNGQGIAFFTVSIGGTIIHLAWQFHTVDLDIPESCWTNFKRNGKLGWIIWGGLMLDYLSIHSPQLEW

SEQ ID NO: 235 - protein, 333 aa, Artificial Sequence
  Description of Artificial Sequence: Synthetic polypeptide
  FungalPT_100
MPATRTPIHPEAAAYRNPRYQSGPLSVIPKSFVPYCELMRLELPHGNFLGYFPHLVGLLYGSSASPARLPANDVVFQAALYIGWTFFMRGAGCAWNDVVDQDFDRKTTRCRVRPVARGAVSTTGANIFALAMVSLAFACISPLPAECQRLGLITTVLSIIYPFCKRVTNFAQVILGMTLAINFILAAYGAGLPAVEAPYTLPTICVTTAITLLVVFYDVVYARQDTADDLKSGVKGMAVLFRNYVEILLTSITLVIAGLLATTGVLVDNGPYFFVFSVAGLLAALLAMIGGIRYRIFHTWNSYSGWFYALAIFNLLGGYLIEYLDQVPMLNRA

SEQ ID NO: 236 - protein, 339 aa, Artificial Sequence
  Description of Artificial Sequence: Synthetic polypeptide
  FungalPT_101
MGEVRGYSRPSHGLFRFIPDAWVPYAELMRLDRQAGFWAFYWHYLIGLGFAINIPPFSSDLDLEDLALLASYLALWTTVFRGITCTWNDNLDQDFDRQVARCRVRPIPRGAVTTLQAHIFTAAQIAVGACILYPFGRSTLIHATVDGVLLFIYPFLKRCTNYPQVELGFGLSYAIFLVTAVVGKDSLAPLLDPSLDLSARVSKVVEAPLAQSAACLYVAGIIWTVIFDTIYAHQDYLDDLKAGVRGLAVRLGRRGTRPACYLAGAVQLYFLVLAGQLAGFGAAYYAISCGVTALLLARMIWAVDLEDGDSCAWAFGPGSGYVGTAICAGLFADFFSRRI

SEQ ID NO: 237 - protein, 326 aa, Artificial Sequence
  Description of Artificial Sequence: Synthetic polypeptide
  FungalPT_102
MATRRNEKEEVPPQGKILDLFHPGIAPYAELMRIHRLLGFYLNTSPYLVGVAFSASISSTKIPIAVLLHRAMLLSIWSIFLRSAGCVWDDLIDMDLDSQISRTKSRPLPRGAVSPSNALLLTVALFACGGTVLIFLPWACTVDCLIVTFFALSYPFGKRFTDYPQITLMNIGWAVPMAMHSLGLDPLSQMTPTVCMFLFIGSVIIMIDVIYSRQDTEEDLKVGVKSMAVRFRDSIQLLSYSLLCASTGFLAMAGVLTGLGLPFFVLSVGGHFCGFWVLLRATQVGKSSGVESYAKYNMPKQAFRPRPETSCATWLLSTSRNEMGRA

SEQ ID NO: 238 - protein, 425 aa, Artificial Sequence
  Description of Artificial Sequence: Synthetic polypeptide
  FungalPT_103
MALPPSDSKDPRPWQILSQALGFPNYDQELWWQNTAETLNRVLEQCDYSVHLQYKYLAFYHKYILPSLGPFRRPGVEPEYISGLSHGGHPLEISVKIDKSKTICRLGLQAIGPLAGTARDPLNSFGDRELLKNLATLLPHVDLRLFDHFNAQVGLDRAQCAVATTKLIKESHNIVCTSLDLKDGEVIPKVYFSTIPKGLVTETPLFDLTFAAIEQMEVYHKDAPLRTALSSLKDFLRPRVPTDASITPPLTGLIGVDCIDPMLSRLKVYLATFRMDLSLIRDYWTLGGLLTDAGTMKGLEMVETLAKTLKLGDEACETLDAERLPFGINYAMKPGTAELAPPQIYFPLLGINDGFIADALVEFFQYMGWEDQANRYKDELKAKFPNVDISQTKNVHRWLGVAYSETKGPSMNIYYDVVAGNVARV

SEQ ID NO: 239 - protein, 312 aa, Artificial Sequence
  Description of Artificial Sequence: Synthetic polypeptide
  FungalPT_104
MARRVEKENGSGPIKSNHDLVRGVWQLFRLHTIEGLSTASIGWLALFFYATQQQLAFDLVRNAFIGIFATYQMTHCVFCLWNDICDRDFDGKVARTRDRPLPSGMVTLTEAMWVFVLGVFASMGVTYWLLGADVTLTMVPIWVLSFIYPLCKRIIWAPQVVLGLTMALCVLPPWVAVRKNSGSAGLLPASLFGAIFCWLVYLDLIYASQDRPDDQKAGVKSLAIFLGDYLKAGLTVLGVLQVVCFVLAASEASAGFLLWVFGIAVWSASVPWSIMSLDTRDRKSGGRIFLVNAILGIYMAAVSGLNVSLAMW

SEQ ID NO: 240 - protein, 370 aa, Artificial Sequence
  Description of Artificial Sequence: Synthetic polypeptide
  FungalPT_105
MPVLVTNDGASITVIFSAKATPAREVYRGPHTPEPEAAEPPASPEAVYSPPKTGIISYLPSSLVPYAELTRMDKPAGTYYLFFPCLWSTLMAAPLTAPMASPGSVIGTSLLFFSGAFIMRSAGCSINDLWDRNLDPHVTRTKFRPIARGALTPFQGLAFTGAQLLVGLGILLQFPTSCLFYGIPSLLLVASYPLAKRVTYYPQAVLGLTFSWGAMMGFPALGVDLLSNSAALTAAACLYSSNVAWTILYDMIYAHMDIKDDAKAGIRSIALRHDAETKQVLTGLAAVQLSLLSAAGFAVGAGPAFFIGSVGGAAVTLGVMIKRVNLKSVKDCWWWFINGCWITGGVVSLGLATDYTLRYVQEEKQNIESQ

SEQ ID NO: 241 - protein, 324 aa, Artificial Sequence
  Description of Artificial Sequence: Synthetic polypeptide
  FungalPT_106
MEFQSTPRPADRSAQILTFKKPFKPMVDTHAYIELSRLHKFPIGSLLIFWPSVWGLTLAAYRTSMNSTAFKTQVFAFLVGSTLLHSAACTINDICDREFDRQVERTKNRPLVTGAASVFGATAWTIMQCIAAIACLWFSNDLAFKVGLLGIFPLHALYPLMKRWTYWPQAWLGLAMNWGLPVAWLSGLGNWIDMDIPATLFLGCFCWTIVYDTIYACQDKRDDVKAGVRSTALLFASWIKEILFLFSVLFVSALAYVGVRNSQGPAYFVISVGGTAIHLVWQLKTLKVDVPEDCWAKFVANHHMGYITWAGMLVDLAFQLSARR

SEQ ID NO: 242 - protein, 350 aa, Artificial Sequence
  Description of Artificial Sequence: Synthetic polypeptide
  FungalPT_107
MASVAAPQPPTSLSPEPQVQSPAAYEAPKTGLLSNLPSSWIPYAELIRLDKPTGTYYLFFPCLFSTLLAAPLAVPIASPLSVLGTSLLFFSGALIMRGAGCTINDLWDRDLDPHVRRTRLRPIARGAVTPFNALAFTGVQLFTGLGILLQFPTQCLFYGIPSLLLVASYPLAKRVTHYPQFVLGLTFSWGAIMGFPALGVDLLQNSAAMAAAGFLYTSNIAWTVLYDMIYAHMDIKDDAKAGIRSIALRHDAQTKQILSGLAVTQIGLLAAAGVAAGAGPVFFVGSCGGAAVTLAIMIRKVNLKSVKDCWWWFVNGCWLTGSVISAGLGAEYLVQYSQRSDPEEMVAKDV

SEQ ID NO: 243 - protein, 338 aa, Artificial Sequence
  Description of Artificial Sequence: Synthetic polypeptide
  FungalPT_108
MTPSAVAPKESLAYQYGGNHSTGWLGYVPARWLPYIQLARLSPPVGLFLIYIPHSFGLLYAAIRQRAEPFEVAYASLLLFGASFFVSNAIHIWNDLIDAPLDAKVERTRNRPIPRGAVSPSAALIFSASQAVCAALFLPLLRGDVAKNTILSAPGFLAWLYYPYAKRHTYWTQTVLGICLSWGIVVGAVALDVEPYSFQTGQVDMPLLLLFVASTLWTMLYDSVYGFQDLEDDVAAGIYSMAVLFQYNIKLVFWLIVAMIAAALGNMGYYAGMGALYYIISVGGTTAFLSLMVAYVDLRSSQSCWWWFSTGFWYAGGSIAGGLLSEYVTMIARAPGFE

SEQ ID NO: 244 - protein, 338 aa, Artificial Sequence
  Description of Artificial Sequence: Synthetic polypeptide
  FungalPT_109
MESPRTGGQPAPMQGEHINFFPNLPAYSDPTTGVLSKLPSSWIPYAQLMRVDRPGGLYAFYFPYLIGITYAACIAPTTLEPLTLLAMAAVLLPVNILLRGAACTWNDTLDQDFDRRVERCRHRPVARGAVSTRQALIFTFAQLAAGYPLLSFFPAPCVWHMVIMVLLFFIYAFMKRVTYYPQVVLGFPFAWAILFSVAAMELPVQGEYAAPTMAIYAANVVWTIIYDTIYAHQDIADDEKAGVRGMALRFRNSTKLLASILATLQVALLALCGIWAGFGVIYFVGTVCGVAAAMGYYIYDVDLTKPESCGAWFGAQFWIVGAGFMAGLTGQYMLNFVP

SEQ ID NO: 245 - protein, 315 aa, Artificial Sequence
  Description of Artificial Sequence: Synthetic polypeptide
  FungalPT_110
MASSSHESDPLMVKKDQAQKLAFPLGYFPEGVRPYLELIRFQKPTGTVLMFWPFAWGLTLAAYHTELPLSNYWPEMARSVFAAFIVRSSACTINDIFDREFDAGVERTKNRPLASGRISVFAAWVWLIVQYLVGVAVYFSYNHVAFWAAIIQLLPLFIVYPFMKRITYWPQAWLGICMNFGLVVAWAAITSNLDVKLLGVFLAGCWGWTMHYDTIYACQDRRDDVKVGVKSTAVMLGDYVRPFTALCAVLFVSMLALVGVWNKQGPIFFVVSVGGTVLHMIWQYATVDLDSPESCGGTCLHSPCCTFLIPGRSEL

SEQ ID NO: 246 - protein, 345 aa, Artificial Sequence
  Description of Artificial Sequence: Synthetic polypeptide
  FungalPT_111
MTTAIAPDTPEPASPEAVYSPPTTGIISYLPASWVPYAELTRIDKPAGTYYLFFPCLFSTLMAAPMAMPMASPASVIGTSLLFFSGALIMRGAGCSINDLWDRNLDPHVTRTKFRPIARGAITPFQGLAFTGAQLLAGLGILVQFPTSCLWYGIPSLLFVASYPLAKRVTYYPQAVLGLTFSWGAMMGFPALGIDLLSNSAALTAAGLLYTSNVAWTILYDMIYAHMDIKDDVKAGIRSIALRHDAETKQVLTGLAAVQLSLLGAAGFAAGAGPAFFIGSVGGAAVTLGVMIKRVNLKSVKDCWWWFINGCWITGGVISLGLAADYTVRYVQGGNEDAAGQRQLE

SEQ ID NO: 247 - protein, 304 aa, Artificial Sequence
  Description of Artificial Sequence: Synthetic polypeptide
  FungalPT_112
MISTNPAGPSPSWWRPYWELARMHKFPAGSILVFWPCVWGYLLSPGSAGLSPRELTVHIFALLVGSTLLHSAACTINDICDIDFDRQVERTKNRPLVTGAVSIFGATVFLALQVLVFFAMLASVNQTALLCGTFGVFPLHAFYPLMKRITWWPQAWLGLAMNWGLPTAWLIAAPRDVKSTAMWALTFGAFCWTIVYDTIYGCQDREDDVTAGVRSTALLFGDFVKPILAMFATVFVASLGYAGVVTGRSAVYFVLAVGGCAAHLSWQLLTLRADNPEDCWRKFNANGYLGYIVAGGMLAERYLA

SEQ ID NO: 248 - protein, 326 aa, Artificial Sequence
  Description of Artificial Sequence: Synthetic polypeptide
  FungalPT_113
MPERNSQLAPEVPAPYENPKYNRGLLRLVPKAWVPYGELMRLELPHGLYLCYFPLFVGILHGSVISPVPVKPSEIAYQATLYLGWNFFLRGAGCAWNDNVDQEFDRQTGRCKTRPIARGAVSTTGANLFTMLFVALAFACIWPLPAICIKLGVLTTGLSLVYPYCKRYTYFASVILGITIAVSFILATYGTGLESIEEKHRAPTIYATVAIVLLIIFYDVVYARPDIVDDLKSGVKGMAVLFRNYIEVLLSILTLAAAGLLALTGRELGTGPYFYLFAVGGLTATYFFIIIQLHRRVFETWTTSSGWLYVFAVINLAAGYLTEYLR

SEQ ID NO: 249 - protein, 315 aa, Artificial Sequence
  Description of Artificial Sequence: Synthetic polypeptide
  FungalPT_114
MTNAVEDSGPRDLLFLLISTSRFNRYMPYYTMMAAESLSIEFILYKAGLCFVHCLLLCGAGNTWNDLVDRDIDARVARTKMRPLASGRVTLTEALLWMTGQYFLSVKMLDLILDGRNIWSLMLPLTASIMLYPYLKRPIFSKVFVYPQYILGLAIGYPAITGWASITGSEEPLGDIIKHCIPICLLVFFWCVYFNTAYSHQDSVDDRKMNINSAYVIAGQRIRLFLAFLSVLPLLTIPYIISTINSPWLWVSWMATWTVSIIMQIAQFDSQKLESGGRIHWDNFLLGLWTIAACMVEVGLQKVEFWKNVEGYIRL

SEQ ID NO: 250 - protein, 266 aa, Artificial Sequence
  Description of Artificial Sequence: Synthetic polypeptide
  FungalPT_115
MAAYRLRTAPYDLAVQLLSFLLGATLIHSAACVASDICDLDFDRQVARTKNRPLVSGRVSMSGAYIWTIIQTLGAIFCLSYTNYYAFRVGLLGVFPIHVLYPLMKRWTYWPQAWLGLGMNWGLPVAWVYAFREPLDIAIPTILFFGTICWSIFYDTIYACQDKVDDVNAGVRSTALLFGTWIRPILALFSVIFIGTLAASGYLNGNGVVYFLLTVGGASLHFIWQLMTLDIDEPNDCWKKFQANHTIGYIIWAGMLVDYYLLLQSP

SEQ ID NO: 251 - protein, 300 aa, Artificial Sequence
  Description of Artificial Sequence: Synthetic polypeptide
  FungalPT_116
MPSRMRALFELTRLHWFPVGCDFMFWPFGWAFLSAAYRLALPVNEVVKSTLFFALLGILVHSAGCVLNDILDRDLDRKVERSQSRPIASGVVTRTEASVLLVVLVAALFYLFSTCGTKAFTLGVVAFPVCIATYPLMKRWMNWPSLFLGFASSWAVPGTWVATTDHYNWGIILNIAIASCCWNCIYDTIYACQDKKDDEKAGVRSMAVHLGKVIRPVLTLFDATFFVCLLWAGYLNDQGVPFYMMSALAPFLLCLWHIWSVDHNDPRDCWKKFTAGRHGGAMVCIGLIVDHCFKLSSTAG

SEQ ID NO: 252 - protein, 272 aa, Artificial Sequence
  Description of Artificial Sequence: Synthetic polypeptide
  FungalPT_117
MSIIRKSAQTFAICWELARFHSSESCLEWFGAMWGALISDIIDRHVDAGVERTKYRPLPSGRISVQGALASCAFLTALASALTHYCLGWDTLLLSIPMYFLNAIYPYMKQLIPWPQLVLAPAVGWTTLIGWAAMAGSLHDLEKCIPLFLATSCWTLYYDTCYGSQDAEEDKKIGVKSLPIWLGTSIHPFLAFLGILIISLLGLSAHASNVSYIFWTFAIGVWAFLIPYQITQLDLKDRTSGGKIFKQNINFGKYVTLVAFAELAYQSFFARF

SEQ ID NO: 253 - protein, 404 aa, Artificial Sequence
  Description of Artificial Sequence: Synthetic polypeptide
  FungalPT_118
MLAVTRWPGRRVITQRSRNSSMQLHNFVRAIQGNSTSQLGSTSRFAALSPRPFHFSSQHRTTTIESPSSPSSPAAPQIYSPPTTGLLSRLPPSWVPYAELVRLDKPAGTYYLFFPCLFSTLLAAPLAEPIASPLTVIGTSALFFSGALIMRGAGCSINDLWDRNLDPKVSRTRLRPIARGAITPFNALAYTGVQLLAGLGILLQFPFSCLFYGVPSLLLVAMYPLAKRVTYYPQFVLGLTFSWGAMMGFPALGVDLLSNSSALAAAGFLYASNVAWTMLYDMIYAHMDIRDDAKAGIRSIALRYDNETKKVLSGLAIVKIGLLGATGWAAGAGPAFFIGSCGGAAVTLGWMIKRVNLKSVKDCWWWFVNGCWITGGTISLGLGADYLVRDLEDRQRETEVDETR

SEQ ID NO: 254 - protein, 314 aa, Artificial Sequence
  Description of Artificial Sequence: Synthetic polypeptide
  FungalPT_119
MSVRAGRRASSPIPQRNTLRGVWELARFHTRESWLCWYPSIWGACIAASSQNVVLDPYAFLKVIFGIWVSVTVSHAAFCTFNDICDQNLDVHVERCKTRPLPSGMISNRNAVLAFLLWMPVTVWVTNATLGDKAVIAFVPIWILSFVYPFMKRLIPFPQVVLGATIGAAVFPGWVAITQRLDDVGEAVPLFWATAVWVVYFDVIYATQDSPDDEKIGVKSLAIFMAKHMTTFLSVLAILQVALFAQAARQAHSSLIFWIFGVCVWALNMPWHLLSLDISDRKSGGRVFRANIKLGLYMTGVSIAELIVNRVRLS

SEQ ID NO: 255 - protein, 374 aa, Artificial Sequence
  Description of Artificial Sequence: Synthetic polypeptide
  FungalPT_120
MSRRHSSRIGETSDSRSKQTSQSSGEKREPSPMPRSSELPADIPTSAGFLSLLPSSWIAYAELMRLDRPAGFYAFYIPYLLGLGYGACLTDSVPSPTHLLSLCGLFLVYSIILRGAACTWNDTVDQEFDRQVARTRLRPIARGAVSTTQANLFTVALVLTEIPVFIRLPAACAYHAIPINILFGGYALMKRITHYPQLVLGFPFAWAILMSCAALDVDPISHHRIVPTMSLFMANILWTMIYDTVYAHQDIRDDIKAGVRSMAIRFASNTKELAATLATVQVALLFCTGWQAGLSPIYFVFTCGGTAVALAYMIAEVDLKEPSSCAWFFHRGFWYVGGSTMMGFAAEYVARLCKSEMVDDGFSLNLLWTKARPA

SEQ ID NO: 256 - protein, 328 aa, Artificial Sequence
  Description of Artificial Sequence: Synthetic polypeptide
  FungalPT_121
MTVQSRPSGKGYTPPATGLLSLLPSSWVPFAELMRLDRPQGYYAFYWHYLIGLSFAACDVSDSCTPFELLVLAAYLGLWVVVLRGSVCTVNDICDQDFDRQVARTRFRPLARRAVSTTQATVFTIAQLFVLALLTLPLPTSSYIFAAATTLALSVYPLGKRITHFPQVILGLAFAIPIFMCCAILNRPTDTDDHSSRAVSALYWVSTIWTVISDTIYAHQDTDDDAKAGVRSLAVLLGQQTKLWLSVLAIIQVALLVFIGAECDFSFLYYTLCCGGAALSLGVMLIKVDLRNPASCAWWFGPGARFMGCSLVGGFLAEYTYRRTGLQY

SEQ ID NO: 257 - protein, 335 aa, Artificial Sequence
  Description of Artificial Sequence: Synthetic polypeptide
  FungalPT_122
MAERRGENAALDNSTSQKTQEPIPPLWVSYVKLTRIHKFPAGSILVYWPSSWGLTLVAYSIKLPSASLCVQLLMYLVGCTLRHNAACIWNDICDRDIDKKVERTRGRPIARGLVSTQAATVFLLAHIILCVLILSYVNNGTARYVYLTKILPSFKVGLFGLLFVDMLYPLTKRWTNWPQAWLGIAMTWGLLVAWISNAGYMNWSFIPVLFFGGIWGFSWTLHYDTIYACQDRKDDIVAGIRSTAVLFGDNVRLISAAFSTCFVLCLAWTGFMNSNGPAYFILSVFGSALHFIWQLSSLDFDNGPECWRMFKANGTGLGFLILSGMLCDYALRVLL

SEQ ID NO: 258 - protein, 321 aa, Artificial Sequence
  Description of Artificial Sequence: Synthetic polypeptide
  FungalPT_123
MAATAQSPTQLVRTLIDVSRFDKYNCLFAIFPGVWSIFLAAASRHADGVHLPSDWVLGRAGLAFAYTYLLSGAGMVWNDWIDRDIDAQVARTKNRPLASGRLATRAAIIWMLVQYAASVWLMDRMLSGQNLWTFMLPLTTGIILYPFGKRPTTRKLGIYPQYILGASSALTILPAWASVYGDSVAPPDLLAKCLPLCVFLFLWTIYFNTAYSYQDVKDDCRLSVNSSYVLAGQYVHGLLLLQAVAVVMVIPWILHENGSAWLWFSWLGVWTAALAEQLYLFDTKDPSTGGRVHRRNFALGIWNVLACFVELLLVSGSLDMF

SEQ ID NO: 259 - protein, 295 aa, Artificial Sequence
  Description of Artificial Sequence: Synthetic polypeptide
  FungalPT_124
MTEKPQTFVSKSPPKWQLYMQLCRLDDFPLGTAFVFWPSAWAATLAAYRYATAFDVLVLHVLTLFGLCTLLHCAGCVVNNILDVDYDRQVERTKSRPLPSGSISMRSAVALLVALVMGSLLFLILASPDPLAFRVGLFSIVLFTLYPLMKRWTNWPQAWLGKSSRHQLPSCMTMNCSIFVGWTIIYDTIYACLDKHDDAKAGVGSTALYFGPRIRPALSLFSLMFIASLTYAGVVNDQTAIYFVVSVGGAGLHLLWQLATVDFESHKDCFDKVFSNVTLGFIIWLGLVLDYVARS

SEQ ID NO: 260 - protein, 316 aa, Artificial Sequence
  Description of Artificial Sequence: Synthetic polypeptide
  FungalPT_125
MASQVNVESGQGRSPPPFPLYFFPAFLRPYLELARVEKPNGFVLMLWPYVWGLTMAAYKTKMPLNGYWRSVINCVISAFILRASACTVNDIFDRRVDAAVARTKQRPIPSGRISVFAACLYLVALYSVGIAFNAATHRGLALWVAIFQLLPLFAIYPLMKRLIQWPSAWLGFAMNFGFLTAWIAITGYVDRALLTTGMASWWCWAVYCDTIYACQDIEDDVKTGVKSSAIFFGSWVRFNLWVIAAAFVILLAVAGVLNNQGWPFFALSVGGTTTHIVWQLSTVDLESPKSCWRAFNRNGYLGWPLWAGLMLDYVLA

SEQ ID NO: 261 - protein, 330 aa, Artificial Sequence
  Description of Artificial Sequence: Synthetic polypeptide
  FungalPT_126
MAVISELRRHHPKTGLLRYLPTGVVPYGELVRIHRALGYYLNTSPYVVGIAYTAATAETKLPLDLLLDRLLLLTLWSLILRSAGCAWNDLVDVDIDRQISRTQSRPLPRGAISLSAATIFTACLFVLGCSLLLFLPRECLFDAGIKVFFALLYPFGKRFTDHPQLILINIAWAIPMAMHSLGMEPSSQILSMLCMCVFFSAVIVMIDLVYSRQDTEEDLKVGVKSMAVRYRNCVETMAYSLFAISSLALLFGGVLGGLRVPFVLFSVGGHIVGFWRFLRASLQAGPAGVESRAKSSCLIASVFWVLGLGIEYAEMVKEKDNPTDKRKHPH

SEQ ID NO: 262 - protein, 409 aa, Artificial Sequence
  Description of Artificial Sequence: Synthetic polypeptide
  FungalPT_127
MSRLIVPNGTRFSLSHRSTFQNSLKLSKHLHSISRGISHHPRNTASPTTALGFSKPRHIIPVISQPTSQREAHTIDSSSSPTLAEPYSPPTSGILSRIPKSWVPYAELIRIDKPTGTYYLYFPCLFSTLMAAPLATPMATPLSVLSTATLFFAGALIMRGAGCSINDLWDRNLDPHVQRTRHRPLARGAITPFQALTYTGVQLLAGLGILLQFPTPCLFYGVPSLLFVASYPLAKRVTYYPQFVLGLTFSWGAVMGFPALGVDLLSNSSALSAAALLYASNVSWTVLYDMIYAHMDIKDDAKAGIRSIALRHDADTKKVLTGLAVVQIGLLGAAGMAVGAGPAFFIGSCGGAALTLGWMIKRVNLKSVKDCWWWFVNGCWITGGVISLGLGIDYLSRYVQDDKTETSED

SEQ ID NO: 263 - protein, 312 aa, Artificial Sequence
  Description of Artificial Sequence: Synthetic polypeptide
  FungalPT_128
MPSRTRALFELTRLHWFPVGCDFMFWPFGWAFLSAAYRLALPLNEVIKTTLFFALLGILVHSAGCVINDMLDRDLDRKVERSQGRPIASGVVTRTEASVLLVVLVAALFYLFSTCGTKAFTLGVVALPICITTYPLMKRWMNWPSLFLGFSSSWAVPGTWVATTGHYNWGIILNIAIASCCWNCIYDTIYACQDKKDDEKAGVRSMAVHLGRAIRPVLTLFDATFFVCLLWAGYLNDQGLPFYLMSVLAPFLLCLWHIWSFDHNDPRDCWKFFTAGRHGGAMVCVGLIVDLYFKPSSPAGGRYNFIHFFRAL

SEQ ID NO: 264 - protein, 162 aa, Artificial Sequence
  Description of Artificial Sequence: Synthetic polypeptide
  FungalPT_129
MLDKDPLAPLLDQSSLDLSTGVSKVLGAPLAQSAACLYFAGIIWTVIFDTIYAHQDYTDDLKAGVRGLAVRLGRRGTKPACYIATAVQVYFLVAAGQLAGFGVSYYAISCGVTALLLTRMIWVVDLEDGNSCAWAFGPGSSYVGTAIFAGLLVEFFAKKHGY

SEQ ID NO: 265 - protein, 405 aa, Artificial Sequence
  Description of Artificial Sequence: Synthetic polypeptide
  FungalPT_130
MNDSITPNSQRNMPRGIWELARLHTREAWLCWYPAIWGACVAAGMRNTSLELAPFLRLIFGIWASVTSTHCAFCTFNDLCDQKLDKHVERCKVRPLPAGMITTSEGILAFICWLPITLAVTWSTLGPVVTAGFIPVWVLSTIYPFMKRIMPFPQVILGAIIGGAVFPGWVGITGDLENLDEALPLFLATASWVVYFDLFYATQDRPDDEKIGVKSLPVLMGKNVQILLAALGILQVLLFAITALWADMSLIFWVLGLGVWMVSVPWHISSLDLKDRHSGGRVFRSNIKLGLYLTVVFIHPTNTTPDARSRPGMANSKLPQPIVAYPRETGRTAVDLILSGTISKNSDVKILLSHVGGTQPIRATRAAIILYDTGLIKLSPETFLEQARDFYRDLALPGNEGNLEL

SEQ ID NO: 266 - protein, 335 aa, Artificial Sequence
  Description of Artificial Sequence: Synthetic polypeptide
  FungalPT_131
MGRSSSTKHDETTPLLPPRRSTDAPSPKSFLGLFSPNVRPYLEIIRLDKQTGTKLMFFPFAWGLTMAAYRVELPLKQYWVELLKYLFGAFILRASAVTINDIFDRDVDAKVERTKLRPLPSGRISVFAASVYLIIQYIIGICFLYFTRHGLAFYVALFQFLPLFAIYPLLKRFTHWPQAWLGLAMNFGFITSWIATTDSIEPYLFVTIMTACWCWTVMYDTIYACQDIKDDIKSGVHSTAILFGSWIKIILKLLAVTFVAMLGIAGYLNHQGPFFFTLSVGGTALQLVWRFSTLDLENNEHCWRDFNRNGQVCYLVWFGLFADYLTKTGILNFLL

SEQ ID NO: 267 - protein, 320 aa, Artificial Sequence; identical to SEQ ID NO: 218
  Description of Artificial Sequence: Synthetic polypeptide
  FungalPT_132

SEQ ID NO: 268 - protein, 335 aa, Artificial Sequence
  Description of Artificial Sequence: Synthetic polypeptide
  FungalPT_133
MAVRPSRNVRMAAKGPLPGDDYMPPTSGILSKLPASWVPYAQLIRLEQPHGIYMIFFPHVVGLMYACSARPTAVPASMLANRLGVFFAWTFFMRGAGCAWNDNVDQDFDRKTARCKNRPIARGAISTSQGHIFTLFLTIIGFLFLRPLPWQCTLCGLATSVLAIIYPFGKRFTNFAQVILGSCLASTIALSAYAVELPALSPPYLVPTLCLTSTIILLVVFYDTIYARQDTADDLKSGVKGMAVLFRNHIELLLGVLTCSIAGLLATTGTILDMGPYFFAFSVVGLTTGLLTMIALIRWHLLPSFAKYSGWFYALAIANLLGGCICEYLGKAPAL

SEQ ID NO: 269 - protein, 300 aa, Artificial Sequence
  Description of Artificial Sequence: Synthetic polypeptide
  FungalPT_134
MPSRTRALFELTRLHWFPVGCDFMFWPFGWAFLSAAYRLALPVNEVVKNILFFALLGILVHSAGCVLNDMLDRDLDRKVERSQGRPIASGVVTRTEASALLVVLVAALFYLFSTCGTKAFTLGVVAFPVCIATYPLMKRWMNWPSLFLGFSSSWAVPGTWVATTDHYDWGIILNIAIASCCWNCIYDTIYACQDKKDDEKAGVRSMAVHLGKAIRPVLTLFDTTFFVCLLWAGYLNDQGLPFYMMSALAPFLLCLWHIWSFDQNDPRDCWKNFTAGRHGGTMVCVGLIVDYCFKLSFPAG

SEQ ID NO: 270 - protein, 320 aa, Artificial Sequence
  Description of Artificial Sequence: Synthetic polypeptide
  FungalPT_135
MPPSRARASTYTPPTKGILSYLPSSWVPYSELIRLDKPHGIYMTIYPYILGLFYAGQITPAPIHLNFLLSRFLNLAIWTFLIRSAGCAWNDNVDQDFDRQTARCRDRPIARGAISTLQGHVFTTALVALGFLSIQDFPLESKIDGAATVLLTCIYPFGKRFTHFAQVTLGSTLSVSIVFGPHAVGANPLSSENFLPTACLVSSIIMLVIFYDVVYARQDTADDLKSGVKGMAVLFRNWITTLLLSLITAITTLLYITGKSLGLSPLFFGLSVAGPAISLLTMIVLIASRSSSSRYAGKFYVLAIFSLLSGFAVEYSRTIM

SEQ ID NO: 271 - DNA, 1161 bp, Artificial Sequence
  Description of Artificial Sequence: Synthetic polynucleotide
  MBP
atgaagatcgaagaaggaaagttagtgatctggataaatggtgataaaggctacaatgggttggcggaagtaggaaaaaagttcgagaaagacacaggaatcaaagttacggtcgagcaccccgataaactagaggaaaagtttccacaggtagctgctacgggggacggaccagacattatcttttgggcccacgatagattcgggggttatgctcagtccggacttctggccgagattactccagacaaggccttccaagacaaactttacccgttcacatgggacgcagtcaggtacaatggaaagctgattgcatatccgatagctgtggaggcacttagcctaatttacaacaaggatctactacctaaccctcccaagacttgggaagaaattccagctctggacaaggagttaaaagcaaagggtaagagtgcacttatgttcaatctacaagagccttatttcacatggcccctaatagccgccgacggaggctatgcctttaagtacgaaaacggcaagtatgacataaaggatgttggggtagacaacgcgggagccaaggctggattaactttcctggtggatttaattaagaacaaacacatgaacgcagacactgactactctatcgcagaagcagcgttcaataaaggcgaaacggcgatgacaattaacgggccctgggcttggtcaaacattgacacgagtaaagttaactatggtgtaacggtattgcccacatttaagggacaacccagtaaacctttcgtaggagtcttgtcagccgggatcaatgcagcttccccgaataaagagcttgctaaggaatttcttgaaaattatcttttaaccgatgagggattggaggcggttaacaaggacaagcctcttggtgctgtagccctgaaatcctatgaagaagagttagctaaggacccaagaatcgccgcaacaatggagaatgctcagaagggagaaattatgccaaatataccacaaatgagtgccttctggtatgcggtaaggacggcagttattaatgccgcttcaggtagacaaacagtcgatgaggctttgaaagatgcacagactaacagttcatccaacaataataacaataacaataacaataacctgggtatcgagggccgt

SEQ ID NO: 272 - DNA, 717 bp, Artificial Sequence
  Description of Artificial Sequence: Synthetic polynucleotide
  VEN
atggtatctaaaggagaagaattgtttacaggcgtggtaccaattctggttgaattggacggtgacgtgaacggacacaaattcagcgtgagtggagaaggcgagggagatgctacctatggcaagttgacgcttaaactgatctgcacaacgggcaaattaccagtgccctggccgacgcttgtaacaactcttggatacgggttacagtgctttgcccgttatccagaccatatgaaacagcatgacttcttcaaatctgcgatgccggagggatatgtacaggaacgtacgattttctttaaggacgatgggaactacaagactcgtgctgaggttaagtttgaaggcgacactctagtcaataggatagaattaaagggtattgattttaaggaggatgggaacatcctgggccataaactagagtacaactacaattcacataatgtctacatcaccgctgataaacagaagaacgggatcaaagctaatttcaagatacgtcataatatcgaagatggtggcgtccagcttgctgaccactaccagcagaacacgcctataggcgacgggccggtgttgctacctgacaatcattatctgtcctatcagtccgccctttcaaaagaccctaatgagaagagggatcatatggtgcttttagaatttgtaaccgcggcagggatcacacttgggatggatgagctgtataaa

SEQ ID NO: 273 - DNA, 351 bp, Artificial Sequence
  Description of Artificial Sequence: Synthetic polynucleotide
  MST
atggcgatgttctgtaccttctttgagaaacatcatagaaaatgggacatcttactagaaaagagcaccggagtgatggaggcgatgaaagtaacttcagaagagaaagagcagttgtctacagctatcgatagaatgaatgaaggtctggacgcatttattcaactatataacgaatccgagatcgatgaacctttaatccagttggatgacgatacagcagaactaatgaaacaggctagggacatgtacggccaagagaaacttaacgagaaattaaacacaataatcaaacaaatcctgtcaatttctgtctccgaagagggtgagaaagaaggaagcggatcaggc

SEQ ID NO: 274 - DNA, 282 bp, Artificial Sequence
  Description of Artificial Sequence: Synthetic polynucleotide
  OSP
atgtacctacttgggattggacttattctggcgcttattgcttgtaagcaaaatgtttccagcctagatgaaaaaaattccgtgtctgtcgatcttcctggcgaaatgaaggttttagtatccaaggagaaaaataaggacggcaaatacgacttgattgcgacagtcgataaactagagctaaaaggcacgagcgataaaaataacggctctggagtgttagaaggggtaaaagcagataaaagcaaggtcaagctgaccatatcagatgatggatcaggc

SEQ ID NO: 275 - DNA, 525 bp, Artificial Sequence
  Description of Artificial Sequence: Synthetic polynucleotide
  OLE
atggcggacagggacaggtcaggtatctatgggggggctcatgcgacctatgggcaacagcagcagcagggaggtggtggacgtccgatgggagaacaagttaagggcatgttacacgacaaaggtcccactgcctcccaagcattgaccgttgcaacattgttcccattgggcggacttttattagtcctttctggcctggctctaactgcaagcgtggtaggcctagctgtagccacacccgtgttcttgattttttctccggtccttgtaccggcggctttactgatcggtactgctgtaatgggtttcctaacatccggggccttagggttaggggggttgtcatccttaacctgcctagcgaacaccgccaggcaggcgtttcagcgtactcccgattacgtcgaggaagcccacaggagaatggctgaggctgcggcgcatgcgggacataaaactgcccaggcaggacaagctattcagggccgtgcacaggaggcaggagccggcggaggcgcggga

SEQ ID NO: 276 - protein, 387 aa, Artificial Sequence
  Description of Artificial Sequence: Synthetic polypeptide
  MBP
MKIEEGKLVIWINGDKGYNGLAEVGKKFEKDTGIKVTVEHPDKLEEKFPQVAATGDGPDIIFWAHDRFGGYAQSGLLAEITPDKAFQDKLYPFTWDAVRYNGKLIAYPIAVEALSLIYNKDLLPNPPKTWEEIPALDKELKAKGKSALMFNLQEPYFTWPLIAADGGYAFKYENGKYDIKDVGVDNAGAKAGLTFLVDLIKNKHMNADTDYSIAEAAFNKGETAMTINGPWAWSNIDTSKVNYGVTVLPTFKGQPSKPFVGVLSAGINAASPNKELAKEFLENYLLTDEGLEAVNKDKPLGAVALKSYEEELAKDPRIAATMENAQKGEIMPNIPQMSAFWYAVRTAVINAASGRQTVDEALKDAQTNSSSNNNNNNNNNNLGIEGR

SEQ ID NO: 277 - protein, 239 aa, Artificial Sequence
  Description of Artificial Sequence: Synthetic polypeptide
  VEN
MVSKGEELFTGVVPILVELDGDVNGHKFSVSGEGEGDATYGKLTLKLICTTGKLPVPWPTLVTTLGYGLQCFARYPDHMKQHDFFKSAMPEGYVQERTIFFKDDGNYKTRAEVKFEGDTLVNRIELKGIDFKEDGNILGHKLEYNYNSHNVYITADKQKNGIKANFKIRHNIEDGGVQLADHYQQNTPIGDGPVLLPDNHYLSYQSALSKDPNEKRDHMVLLEFVTAAGITLGMDELYK

SEQ ID NO: 278 - protein, 117 aa, Artificial Sequence
  Description of Artificial Sequence: Synthetic polypeptide
  MST
MAMFCTFFEKHHRKWDILLEKSTGVMEAMKVTSEEKEQLSTAIDRMNEGLDAFIQLYNESEIDEPLIQLDDDTAELMKQARDMYGQEKLNEKLNTIIKQILSISVSEEGEKEGSGSG

SEQ ID NO: 279 - protein, 94 aa, Artificial Sequence
  Description of Artificial Sequence: Synthetic polypeptide
  OSP
MYLLGIGLILALIACKQNVSSLDEKNSVSVDLPGEMKVLVSKEKNKDGKYDLIATVDKLELKGTSDKNNGSGVLEGVKADKSKVKLTISDDGSG

What is claimed is:

1. A non-naturally occurring nucleic acid comprising a nucleotide sequence encoding a prenyltransferase (PT) protein or a complement of the nucleotide sequence, wherein the nucleotide sequence is codon optimized for production in a microorganism or a plant.

2. (canceled)

3. The nucleic acid of claim 1, wherein the nucleotide sequence is at least 90% identical to any one of SEQ ID NOs: 1-135.

4. The nucleic acid of claim 1, wherein the nucleotide sequence is at least 95% identical to any one SEQ ID NOs: 1-135.

5-6. (canceled)

7. The nucleic acid of claim 1, wherein the nucleotide sequence encodes an enzymatically active PT protein comprising an amino acid sequence having at least 90% amino acid identity to any one of SEQ ID NO: 136-270.

8. The nucleic acid of claim 1, wherein the nucleotide sequence encodes an enzymatically active PT protein comprising an amino acid sequence having at least 95% amino acid identity to any one of SEQ ID NO: 136-270.

9. (canceled)

10. The nucleic acid of claim 3, encoding an enzymatically active PT protein comprising an amino acid sequence having 95% amino acid identity to any one of SEQ ID NO: 136-270.

11. (canceled)

12. The nucleic acid of claim 8, wherein the encoded PT protein comprises one or more conservative amino acid substitutions that prevent or promote a post-translational modification of the PT protein.

13. (canceled)

14. The nucleic acid of claim 1, further comprising another nucleic acid encoding a codon optimized cofolding peptide .

15-16. (canceled)

17. The nucleic acid of claim 14, wherein the codon optimized cofolding peptide is encoded by any one of SEQ ID NOs: 271-275.

18. The nucleic acid of claim 1, wherein the microorganism or plant is a yeast cell, and the nucleic acid further comprises a promoter functional in the yeast cell.

19-20. (canceled)

21. A yeast expression cassette comprising the nucleic acid of claim 1.

22. A non-naturally occurring prenyltransferase (PT) comprising an amino acid sequence having at least 90% amino acid sequence identity to any one of SEQ ID NO: 136-270.

23. The PT of claim 22, comprising the amino acid sequence having at least 95% amino acid sequence identity to any one of SEQ ID NO: 136-270.

24-26. (canceled)

27. The PT of claim 22, expressed in a microorganism or a plant.

28. (canceled)

29. A recombinant microorganism or plant expressing a first PT protein encoded by the nucleic acid of claim 1.

30-31. (canceled)

32. The recombinant microorganism or plant of claim 29, wherein the first PT protein comprises an amino acid sequence having at least 95% amino acid sequence identity or conservative amino acid substitutions to any one of SEQ ID NO: 136-270.

33-34. (canceled)

35. The recombinant microorganism or plant of claim 29, further expressing a second PT protein, the first PT protein is a fungal PT protein and the second PT is a plant PT protein.

36. (canceled)

37. The recombinant microorganism or plant of claim 29, further expressing at least one other recombinant enzyme in a cannabinoid biosynthetic pathway.

38. The recombinant microorganism or plant of claim 37, wherein the at least one other recombinant enzyme is an olivetolic acid cyclase (OAC), a polyketide synthase, an olivetol synthase, a geranyl pyrophosphate synthase (GPPS), a malonate transporter, an aromatase, a dehydrogenase, an oxidase, a desaturase, a decarboxylase, a cannabinoid synthase including a THCA, a CBCA or a CBDA synthase, a cytochrome P450 (CYP-450), a cytochrome P450 reductase (CPR), or any combination thereof.

39. The recombinant microorganism or plant of claim 37, wherein the microorganism or plant:
i) is not a Cannabis sp., and
ii) produces at least one cannabinoid, wherein the at least one cannabinoid is cannabigerol (CBG), cannabigerolic acid (CBGA), cannabidiolic acid (CBDA), cannabichromene (CBC), cannabidivarin (CBCV), cannabichromenic acid (CBCA), cannabichromevarinic acid (CBCVA), cannabinol (CBN), 11-hydroxycannabinol (11-OH-CBN), cannabinerolic acid (CBNA), cannabivarin (CBV), 11-hydroxycannabivarin (11-OH-CBV), cannabinerovarinic acid (CBNVA), cannabigerophorolic acid (CBGPA), cannabigerovarinic acid (CBGVA), cannabigerogerovarinic acid (CBGGVA), tetrahydrocannabinol (THC), tetrahydrocannabinolic acid (THCA), 11-hydroxy tetrahydrocannabinol (11-OH-THC), tetrahydrocannabivarin (THCV), 11-hydroxy tetrahydrocannabivarin (11-OH-THCV), tetrahydrocannabivarin acid (THCVA), cannabinerovarinic acid (CBNVA), sesquicannabigerol (CBF), cannabigerogerol (CBGG), sesquicannabigerolic acid (CBFA), cannabigerogerolic acid (CBGGA), sesquicannabidiolic acid (CBDFA), sesquitetrahydrocannabinolic acid (THCFA), sesquicannabigerovarinic acid (CBFVA), sesquicannabichromenic acid (CBCFA), sesquicannabigerophorolic acid (CBFPA), cannabidiol (CBD), cannabidiolic acid (CBDA), cannabidivarinic acid (CBDVA), cannabidivarin (CBDV) or any combination thereof.

40. (canceled)

41. A method of catalyzing the condensation of a polyprenol diphosphate and an alkylresorcinol or alkylresorcyclic acid to yield a cannabinoid, the method comprising combining the polyprenol diphosphate and the alkylresorcinol or alkylresorcyclic acid with the PT of claim 22 under conditions and for a time sufficient to yield a cannabinoid.

42. The method of claim 41, wherein the polyprenol diphosphate is geranyl pyrophosphate (GPP) or farnesyl pyrophosphate (FPP) or geranylgeranyl pyrophosphate (GGPP), and wherein the alkylresorcinol or alkylresorcyclic acid is olivetol (OL) or olivetolic acid (OA), divarinolic acid, divarinol, orcinol, orsellinic acid, sphaerolic acid, sphaerophorol.

43. (canceled)

44. The method of claim 41, wherein the cannabinoid is cannabigerolic acid (CBGA), cannabigerol (CBG), or cannabigerovarinic acid (CBGVA).

45. The method of claim 41, wherein the catalysis is performed in vitro.

46. The method of claim 41, wherein the catalysis is performed in a recombinant microorganism or plant expressing the PT.

47-48. (canceled)

49. The method of claim 46, wherein the recombinant microorganism or plant also expresses a second PT, and wherein the second PT is a plant PT.

50. (canceled)

51. The method of claim 46, wherein the recombinant microorganism or plant also expresses at least one other recombinant enzyme in a cannabinoid biosynthetic pathway, wherein the at least one other recombinant enzyme is an olivetolic acid cyclase (OAC), a polyketide synthase, an olivetol synthase, a geranyl pyrophosphate synthase (GPPS), a malonate transporter, an aromatase, a dehydrogenase, an oxidase, a desaturase, a decarboxylase, a cannabinoid synthase including a THCA, a CBCA or a CBDA synthase, a cytochrome P450 (CYP-450), a cytochrome P450 reductase (CPR), or any combination thereof.

52. (canceled)

53. The method of claim 51, wherein the microorganism or plant:
i) is not a Cannabis sp., and
ii) produces at least one cannabinoid wherein at least one cannabinoid is cannabigerol (CBG), cannabigerolic acid (CBGA), cannabidiolic acid (CBDA), cannabichromene (CBC), cannabidivarin (CBCV), cannabichromenic acid (CBCA), cannabichromevarinic acid (CBCVA), cannabinol (CBN), 11-hydroxycannabinol (11-OH-CBN), cannabinerolic acid (CBNA), cannabivarin (CBV), 11-hydroxycannabivarin (11-OH-CBV), cannabinerovarinic acid (CBNVA), cannabigerophorolic acid (CBGPA), cannabigerovarinic acid (CBGVA), cannabigerogerovarinic acid (CBGGVA), tetrahydrocannabinol (THC), tetrahydrocannabinolic acid (THCA), 11-hydroxy tetrahydrocannabinol (11-OH-THC), tetrahydrocannabivarin (THCV), 11-hydroxy tetrahydrocannabivarin (11-OH-THCV), tetrahydrocannabivarin acid (THCVA), cannabinerovarinic acid (CBNVA), sesquicannabigerol (CBF), cannabigerogerol (CBGG), sesquicannabigerolic acid (CBFA), cannabigerogerolic acid (CBGGA), sesquicannabidiolic acid (CBDFA), sesquitetrahydrocannabinolic acid (THCFA), sesquicannabigerovarinic acid (CBFVA), sesquicannabichromenic acid (CBCFA), sesquicannabigerophorolic acid (CBFPA), cannabidiol (CBD), cannabidiolic acid (CBDA), cannabidivarinic acid (CBDVA), cannabidivarin (CBDV) or any combination thereof.

54. (canceled)
